United States Patent Application Publication US 2023/0346928 A1 - sequence listing, part 2

SEQ ID NO: 840 - DNA, 1596 bp, synthetic construct
  misc_feature 1..1596: note = hIL15R-alpha-B_031
  source 1..1596: mol_type = other DNA
atgtgccaccagcagctcgtgatcagctggttctcgcttgtgttcctggcctcccccctcgtcgccatctgggagctgaagaaagacgtgtacgtggtggagctggactggtatcccgacgccccgggggagatggtggtgctgacctgcgacaccccggaagaggacggcatcacctggacgctcgaccagtcgtccgaagtgctggggtcgggcaagaccctcaccatccaggtgaaggagttcggagacgccggccagtacacctgtcataaggggggggaggtgctgagccacagcctcctgctcctgcacaaaaaggaggacggcatctggagcaccgatatcctcaaggaccagaaggagcccaagaacaagacgttcctgaggtgtgaggccaagaactacagcgggcggttcacgtgttggtggctcaccaccatctccaccgacctcaccttctccgtgaagtcaagcaggggcagctccgacccccaaggcgtcacctgcggcgccgccaccctgagcgccgagagggtcaggggggataacaaggaatacgagtacagtgtggagtgccaagaggatagcgcctgtcccgccgccgaagagagcctgcccatcgaagtgatggtggacgccgtgcacaagctgaagtacgagaactacacctccagcttcttcatcagggatatcatcaagcccgatccccccaagaacctgcagctgaagcccctgaagaacagcaggcaggtggaggtgagctgggagtatcccgacacgtggagcaccccgcacagctacttctcgctgaccttctgcgtgcaggtgcaagggaagtccaagagggagaagaaggatagggtgttcaccgacaaaacgagcgccaccgtgatctgccggaagaatgccagcatctctgtgagggcccaggacaggtactattccagctcctggtcggagtgggccagcgtgccctgtagcggcgggggcgggggcggcagcaggaacctcccggttgccacccccgaccccggcatgtttccgtgcctgcaccactcgcaaaacctgctgcgcgcggtctccaacatgctgcaaaaagcgcgccagacgctggagttctacccctgcaccagcgaggagatcgatcatgaagatatcaccaaagacaagacctcgaccgtggaggcctgcctgcccctggagctcaccaagaacgaaagctgcctgaacagcagggagacaagcttcatcaccaacggcagctgcctggcctcccggaagaccagcttcatgatggccctgtgcctgtccagcatctacgaggatctgaagatgtaccaagtggagtttaagaccatgaacgccaagctgttaatggaccccaaaaggcagatcttcctggatcagaacatgctggccgtcatcgacgagctgatgcaagccctgaacttcaacagcgagacggtgccccagaagagcagcctcgaggagcccgacttctataagaccaagataaagctgtgcattctgctgcacgccttcagaatcagggccgtgaccatcgatagggtgatgagctacctgaacgccagc

SEQ ID NO: 841 - DNA, 1596 bp, synthetic construct
  misc_feature 1..1596: note = hIL15R-alpha-B_032
  source 1..1596: mol_type = other DNA
atgtgtcaccagcagctggtgatttcctggttcagtctggtgtttcttgccagccccctggtggccatctgggagctgaagaaagacgtatacgtcgtggagctggactggtatcccgacgctcccggcgagatggtggtcctcacctgcgacaccccagaggaggacggcatcacctggaccctggaccagagctccgaggtcctgggcagcggtaagaccctcaccatccaggtgaaggagtttggtgatgccgggcagtatacctgccacaagggcggcgaggtgctgtcccacagcctcctgttactgcataagaaggaggatggcatctggagcaccgacatcctcaaggaccagaaagagcccaagaacaagacctttctgcggtgcgaggcgaaaaattactccggccggttcacctgctggtggctgaccaccatcagcacggacctgacgttctccgtgaagtcgagcagggggagctccgatccccagggcgtgacctgcggcgcggccaccctgagcgccgagcgcgtccgcggggacaataaggaatacgaatatagcgtggagtgccaggaggacagcgcctgccccgcggccgaggagagcctcccgatcgaggtgatggtggatgccgtccacaagctcaaatacgaaaactacaccagcagcttcttcattagggacatcatcaagcccgacccccccaaaaacctgcagctgaagcccctgaagaacagccgccaggtcgaggtgtcatgggagtacccagacacctggagcaccccccactcctacttcagcctgaccttctgcgtccaggtgcagggaaagtccaaacgggagaagaaggatagggtctttaccgataagacgtcggccaccgtcatctgcaggaagaacgccagcataagcgtgcgggcgcaggatcggtactacagctcgagctggtccgaatgggcctccgtgccctgtagcggagggggtggcgggggcagcaggaacctgcccgtggccaccccggacccgggcatgtttccctgcctgcatcacagtcagaacctgctgagggccgtgagcaacatgctccagaaggcccgccagaccctggagttttacccctgcaccagcgaagagatcgatcacgaagacatcaccaaagacaagacctccaccgtggaggcctgtctgcccctggagctgaccaagaacgagagctgtctgaacagcagggagacctccttcatcaccaacggctcctgcctggcatcccggaagaccagcttcatgatggccctgtgtctgagctctatctacgaggacctgaagatgtaccaggtcgagttcaagaccatgaacgccaagctgctgatggaccccaagcgacagatattcctggaccagaacatgctcgccgtgatcgatgaactgatgcaagccctgaacttcaatagcgagaccgtgccccagaaaagcagcctggaggagcccgacttctacaagaccaagatcaaactgtgcatactgctgcacgcgttcaggatccgggccgtcaccatcgaccgggtgatgtcctatctgaatgccagc

SEQ ID NO: 842 - DNA, 1596 bp, synthetic construct
  misc_feature 1..1596: note = hIL15R-alpha-B_033
  source 1..1596: mol_type = other DNA
atgtgccaccagcagctcgtgattagctggttttcgctggtgttcctggccagccctctcgtggccatctgggagctgaaaaaagacgtgtacgtggtggagctggactggtacccggacgcccccggcgagatggtggtgctgacgtgcgacaccccggaagaggacggcatcacctggaccctggaccagtcatccgaggtcctgggcagcggcaagacgctcaccatccaggtgaaggagttcggcgacgccggccagtacacatgccataagggcggggaggtgctgagccacagcctgctcctcctgcacaagaaggaggatggcatctggtctacagacatcctgaaggaccagaaagagcccaagaacaagaccttcctccggtgcgaggccaagaactactccgggcggtttacttgttggtggctgaccaccatcagcaccgacctcaccttcagcgtgaagagctcccgagggagctccgacccccagggggtcacctgcggcgccgccaccctgagcgccgagcgggtgaggggcgacaacaaggagtatgaatacagcgtggaatgccaagaggacagcgcctgtcccgcggccgaggaaagcctgcccatcgaggtgatggtggacgccgtccacaaactcaagtacgagaactacaccagcagtttcttcattcgcgacatcatcaagccggacccccccaaaaacctgcagctcaaacccctgaagaacagcaggcaggtggaggtcagctgggagtacccggacacctggagcaccccccatagctacttcagcctgaccttctgcgtgcaggtgcagggcaagagcaaacgcgagaagaaggaccgggtgtttaccgacaagaccagcgccacggtgatctgccgaaagaatgcaagcatctccgtgagggcgcaggaccgctactactctagcagctggagcgagtgggccagcgtgccctgcagcggtggcggcggaggcggcagccgtaacctccccgtggccacccccgaccccggcatgttcccgtgtctgcaccactcccagaacctgctgagggccgtcagcaatatgctgcagaaggcccggcagacgctggagttctacccctgcacctccgaggagatcgaccatgaggacattaccaaggacaagacgagcactgtggaggcctgcctgcccctggagctcaccaaaaacgagagctgcctgaatagcagggagacgtccttcatcaccaacggcagctgtctggccagcaggaagaccagcttcatgatggccctgtgcctctcctccatatatgaggatctgaagatgtaccaggtggagttcaagaccatgaacgccaagctgctgatggatcccaagaggcagatcttcctggaccagaatatgctggccgtgattgacgagctgatgcaggccctgaactttaatagcgagaccgtcccccagaagagcagcctggaggagcccgacttctataagaccaagatcaagctgtgcatactgctgcacgcgtttaggataagggccgtcaccatcgacagggtgatgagctacctgaatgccagc

SEQ ID NO: 843 - DNA, 1596 bp, synthetic construct
  misc_feature 1..1596: note = hIL15R-alpha-B_034
  source 1..1596: mol_type = other DNA
atgtgccaccaacagctggtgatctcctggttcagcctggtgttcctcgccagccccctggtggccatctgggagctgaagaaagacgtgtacgtggtggagctggactggtatcccgacgcccccggcgagatggtcgtgctgacctgcgacaccccggaggaggacggcatcacctggaccctggatcagtcctccgaggtgctgggcagcgggaagaccctgaccatccaggtgaaagagttcggagatgccggccagtatacctgtcacaaggggggtgaggtgctgagccatagcctcttgcttctgcacaagaaggaggacggcatctggtccaccgacatcctcaaggaccaaaaggagccgaagaataaaacgttcctgaggtgcgaagccaagaactattccggacggttcacctgctggtggctgaccaccatcagcaccgacctcaccttctccgtaaagtcaagcaggggcagctccgacccccagggcgtgacctgcggagccgccaccctgagcgcagagagggtgaggggcgacaacaaggagtacgaatactccgtcgagtgccaggaggacagcgcctgccccgccgccgaggaaagtctgcccatcgaggtgatggtggacgccgtgcacaagctcaaatacgagaactacaccagcagcttcttcatccgggatatcatcaagcccgaccctccaaagaatctgcagctgaaaccccttaagaacagcaggcaggtggaggtcagctgggagtaccccgacacctggagcacgccccactcctactttagcctgaccttttgcgtgcaggtgcaggggaaaagcaagcgggagaagaaggacagggtgttcaccgataagacctccgctaccgtgatctgcaggaagaacgcctcaatcagcgtgagggcccaggatcggtactactccagctcctggagcgagtgggccagcgtgccctgctctggcggtggcggcgggggcagccggaacctgccggtggccactcccgacccgggcatgttcccgtgcctccaccattcccagaacctgctgcgggccgtgtccaatatgctccagaaggcaaggcagaccctggagttctacccctgcaccagcgaggagatcgatcacgaggacatcaccaaagacaaaaccagcacggtcgaggcctgcctgcccctggaactcaccaagaacgaaagctgtctcaacagccgcgagaccagcttcataaccaacggttcctgtctggcctcccgcaagaccagctttatgatggccctctgtctgagctccatctatgaagacctgaaaatgtaccaggtggagttcaaaaccatgaacgccaagcttctgatggaccccaagaggcagatcttcctggatcagaacatgctggccgtgatcgacgagctgatgcaggccctgaactttaactccgagaccgtgccccagaaaagcagcctggaagagcccgatttctacaaaacgaagatcaagctgtgcatcctgctgcacgccttccggatccgtgcggtgaccatcgatagggtgatgagctacctgaacgccagc

SEQ ID NO: 844 - DNA, 1596 bp, synthetic construct
  misc_feature 1..1596: note = hIL15R-alpha-B_035
  source 1..1596: mol_type = other DNA
atgtgccaccaacagctggtaatcagctggttcagcctggttttcctcgcgtcgcccctggtggccatctgggagttaaagaaggacgtgtacgtggtggagctggattggtaccccgacgccccgggcgagatggtcgtgctcacctgcgatacccccgaggaggacgggatcacctggaccctggaccaatccagcgaggtgctgggcagcggcaagaccctgaccatacaggtgaaggaatttggggacgccgggcagtacacctgccacaagggcggggaagtgctgtcccactccctcctgctgctgcataagaaggaggacggcatctggagcaccgacatcctgaaggaccaaaaggagcccaagaacaagaccttcctgaggtgcgaggccaaaaactattccggccgctttacctgttggtggctgaccaccatctccaccgatctgaccttcagcgtgaagtcgtctaggggctcctccgacccccagggcgtaacctgcggcgccgcgaccctgagcgccgagagggtgcggggcgataacaaagagtacgagtactcggtggagtgccaggaggacagcgcctgtccggcggccgaggagagcctgcccatcgaggtgatggtggacgccgtccacaagctgaagtacgagaactacaccagttcgttcttcatcagggacatcatcaagccggacccccccaagaacctccagctgaagcccctgaagaacagcaggcaggtggaagtgtcctgggagtatcccgacacctggagcaccccccacagctacttcagcctgaccttttgcgtgcaggtgcagggcaaaagcaagagggaaaagaaggaccgggtgttcaccgataagacgagcgccaccgttatctgcaggaagaacgcctccataagcgtgagggcgcaggaccgttactacagcagcagctggagtgagtgggcaagcgtgccctgtagcggcgggggcgggggcgggtcccgcaacctccccgtcgccacccccgacccaggcatgtttccgtgcctgcaccacagccagaacctgctgcgggccgttagcaacatgctgcagaaggccaggcagaccctcgagttctatccctgcacatctgaggagatcgaccacgaagacatcactaaggataagacctccaccgtggaggcctgtctgcccctcgagctgaccaagaatgaatcctgcctgaacagccgagagaccagctttatcaccaacggctcctgcctggccagcaggaagacctccttcatgatggccctgtgcctctccagcatctacgaggatctgaagatgtaccaggtagagttcaagacgatgaacgccaagctcctgatggaccccaagaggcagatattcctggaccagaacatgctggcggtgatcgacgagctgatgcaggccctgaatttcaacagcgagacggtgccacagaagtccagcctggaggagccagacttctacaagaccaagatcaaactgtgcatcctcctgcacgcgttcaggatccgcgccgtcaccatagacagggtgatgagttatctgaacgccagc

SEQ ID NO: 845 - DNA, 1596 bp, synthetic construct
  misc_feature 1..1596: note = hIL15R-alpha-B_036
  source 1..1596: mol_type = other DNA
atgtgccatcagcagctggtaatcagctggtttagcctggtgttcctggccagcccactggtggccatctgggagctgaagaaggacgtgtacgtggtggaactggactggtaccccgacgcccctggcgagatggtggtactgacctgtgacaccccggaggaagacggtatcacctggaccctggatcagagctccgaggtgctgggctccggcaagacactgaccatccaagttaaggaatttggggacgccggccagtacacctgccacaaggggggcgaggtgctgtcccactccctgctgcttctgcataagaaggaggatggcatctggtccaccgacatactgaaggaccagaaggagcccaagaataagaccttcctgagatgcgaggccaagaactactcgggaaggttcacctgctggtggctgaccaccatcagcaccgacctgaccttctccgtgaagagctcccggggcagctccgacccccagggcgtaacctgtggggccgctaccctgtccgccgagagggtccggggcgacaacaaggaatacgagtacagcgtggagtgccaggaggactccgcctgccccgccgccgaggagtcgctgcccatagaggtgatggtggacgccgtgcacaagctcaagtacgagaattacaccagcagcttctttatcagggacataattaagccggaccccccaaagaatctgcagctgaagcccctgaagaatagccggcaggtggaagtgtcctgggagtaccccgacacctggagcaccccccactcctatttctcactgacattctgcgtgcaggtgcaagggaaaagcaagagggagaagaaggatagggtgttcaccgacaagacaagcgccaccgtgatctgccgaaaaaatgccagcatcagcgtgagggcccaggatcggtattacagcagctcctggagcgagtgggccagcgtgccctgttccggcgggggagggggcggctcccggaacctgccggtggccacccccgaccctggcatgttcccctgcctgcatcacagccagaacctgctccgggccgtgtcgaacatgctgcagaaggcccggcagaccctcgagttttacccctgcaccagcgaagagatcgaccacgaagacataaccaaggacaagaccagcacggtggaggcctgcctgcccctggagcttaccaaaaacgagtcctgcctgaacagccgggaaaccagcttcataacgaacgggagctgcctggcctccaggaagaccagcttcatgatggcgctgtgtctgtccagcatatacgaggatctgaagatgtatcaggtggaattcaaaactatgaatgccaagctcctgatggaccccaagaggcagatcttcctggaccagaacatgctagccgtgatcgacgagctgatgcaggccctcaacttcaactcggagacggtgccccagaagtccagcctcgaggagcccgacttctacaagaccaagatcaagctgtgcatactgctgcatgccttcaggataagggcggtgactatcgacagggtcatgtcctacctgaacgccagc

SEQ ID NO: 846 - DNA, 1596 bp, synthetic construct
  misc_feature 1..1596: note = hIL15R-alpha-B_037
  source 1..1596: mol_type = other DNA
atgtgccaccaacaactggtgatcagctggttctccctggtgttcctggccagccccctggtggccatctgggagctcaaaaaagacgtgtacgtggtggagctcgattggtacccagacgcgccgggggaaatggtggtgctgacctgcgacaccccagaggaggatggcatcacgtggacgctggatcagtccagcgaggtgctggggagcggcaagacgctcaccatccaggtgaaggaatttggcgacgcgggccagtatacctgtcacaagggcggcgaggtgctgagccactccctgctgctgctgcacaagaaggaggatgggatctggtcaaccgatatcctgaaagaccagaaggagcccaagaacaagaccttcctgcgctgcgaggccaagaactatagcggcaggttcacctgctggtggctgaccaccatcagcaccgacctgaccttcagcgtgaaatcctccaggggcagcagcgacccccagggcgtgacctgcggtgccgccacgctctccgccgagcgagtgaggggtgacaacaaggagtacgagtacagcgtggaatgtcaggaggacagcgcctgtcccgccgccgaggagtcgctgcccatcgaggtgatggtcgacgcggtgcacaagctcaaatacgagaattacaccagcagcttcttcatcagggacatcatcaagcccgacccccccaagaacctgcagctgaagcccttgaagaacagcaggcaggtggaggtgagctgggagtacccggacacctggagcaccccccactcctacttcagcctgacgttctgtgtgcaggtgcaggggaagtccaagagggagaagaaggaccgggtgttcaccgacaagaccagcgccaccgtgatatgccgcaagaacgcgtccatcagcgttcgcgcccaggaccgctactacagcagctcctggtccgaatgggccagcgtgccctgcagcggtggagggggcgggggctccaggaatctgccggtggccacccccgaccccgggatgttcccgtgtctgcatcactcccagaacctgctgcgggccgtgagcaatatgctgcagaaggccaggcagacgctcgagttctacccctgcacctccgaagagatcgaccatgaggacatcaccaaggacaagaccagcaccgtggaggcctgcctccccctggagctgaccaaaaacgagagctgcctgaactccagggagaccagctttataaccaacggcagctgcctcgcctccaggaagacctcgtttatgatggccctctgcctgtccagcatctacgaggacctgaagatgtaccaggtggagttcaagaccatgaacgcgaagttgctcatggaccccaagaggcagatcttcctggaccagaacatgctcgcggtgatcgacgagctgatgcaagccctgaacttcaacagcgagaccgtgccccagaagagcagcctggaagagcccgacttctacaagaccaagatcaagctgtgcatcctgctgcacgccttccggatccgggccgtgaccatcgacagggtgatgagctacctcaacgcctcc

SEQ ID NO: 847 - DNA, 1596 bp, synthetic construct
  misc_feature 1..1596: note = hIL15R-alpha-B_038
  source 1..1596: mol_type = other DNA
atgtgccaccagcagctcgtgatcagctggttctccctcgtcttcctggcctccccgctggtggccatctgggagctgaagaaggacgtgtacgtggtggagctggactggtatcccgacgcccccggcgagatggtggtgctgacgtgcgacacaccagaagaggacgggatcacatggaccctggatcagtcgtccgaggtgctggggagcggcaagaccctcaccatccaagtgaaggagttcggggacgccggccagtacacctgccacaagggcggggaggtgctctcccatagcctgctcctcctgcacaaaaaggaggatggcatctggagcaccgacatcctgaaggaccagaaggagcccaagaacaagacatttctcaggtgtgaggccaagaactattcgggcaggtttacctgttggtggctcaccaccatctctaccgacctgacgttctccgtcaagtcaagcagggggagctcggacccccagggggtgacatgtggggccgccaccctgagcgcggagcgtgtccgcggcgacaacaaggagtacgagtattccgtggagtgccaggaggacagcgcctgccccgccgccgaggagtccctgcccatagaggtgatggtggacgccgtccacaagttgaagtacgaaaattatacctcctcgttcttcattagggacatcatcaagcctgaccccccgaagaacctacaactcaagcccctcaagaactcccgccaggtggaggtgtcctgggagtaccccgacacctggtccaccccgcacagctacttcagcctgaccttctgcgtgcaggtccaggggaagagcaagcgtgaaaagaaagacagggtgttcaccgacaagacgagcgccaccgtgatctgcaggaaaaacgcctccatctccgtgcgcgcccaggacaggtactacagtagctcctggagcgaatgggccagcgtgccgtgcagcggcgggggaggaggcggcagtcgcaacctgcccgtggccacccccgaccccggcatgttcccatgcctgcaccacagccagaacctgctgagggcagtcagcaatatgctgcagaaggccaggcagaccctggagttttatccctgcaccagcgaggagatcgaccacgaggacatcaccaaggacaagacctccaccgtcgaggcctgcctgccactggagctgaccaaaaacgagagctgcctgaactccagggagacctccttcatcaccaacgggagctgcctggccagccggaagaccagcttcatgatggcgctgtgcctcagcagcatctacgaggatctcaagatgtaccaggtggagttcaagaccatgaacgcgaagctgctgatggaccccaagcggcagatcttcctggaccagaacatgctggccgtgattgacgagctcatgcaggccctgaacttcaatagcgagaccgtcccccaaaagagcagcctggaggaacccgacttctacaaaacgaagatcaagctctgcatcctgctgcacgccttccggatccgggccgtgaccatcgatcgtgtgatgagctacctgaacgcctcg

SEQ ID NO: 848 - DNA, 1596 bp, synthetic construct
  misc_feature 1..1596: note = hIL15R-alpha-B_039
  source 1..1596: mol_type = other DNA
atgtgccaccagcagctcgtcatctcctggtttagcctggtgtttctggcctcccccctggtcgccatctgggagctgaagaaagacgtgtacgtggtggagctggactggtacccggacgctcccggggagatggtggtgctgacctgcgacacccccgaggaggacggcatcacctggaccctggaccagagctccgaggtgctggggagcggcaagaccctgaccattcaggtgaaagagttcggcgacgccggccaatatacctgccacaaggggggggaggtcctgtcgcattccctgctgctgcttcacaaaaaggaggatggcatctggagcaccgacatcctgaaggaccagaaagaacccaagaacaagacgttcctgcgctgcgaggccaagaactacagcggccggttcacctgttggtggctgaccaccatctccaccgacctgactttctcggtgaagagcagccgcgggagcagcgacccccagggagtgacctgcggcgccgccaccctgagcgccgaaagggtgaggggcgacaataaagagtacgagtattccgtggagtgccaggaggacagcgcctgtcccgccgccgaggagtccctgcctatcgaggtgatggtcgacgcggtgcacaagctcaagtacgaaaactacaccagcagctttttcatcagggatatcatcaaaccagacccccccaagaacctgcagctgaagcccctgaaaaacagcaggcaggtggaagtgagctgggaataccccgatacctggtccaccccccacagctacttcagcctgaccttctgcgtgcaggtgcaggggaagtccaagcgggagaagaaagatcgggtgttcacggacaagaccagcgccaccgtgatttgcaggaaaaacgccagcatctccgtgagggctcaggacaggtactacagctccagctggagcgagtgggcctccgtgccttgcagcgggggaggaggcggcggcagcaggaatctgcccgtcgcaacccccgaccccggcatgttcccctgcctgcaccacagccagaatctgctgcgagccgtgagcaacatgctccagaaggcccggcagacgctggagttctacccctgcacctccgaggagatcgaccacgaggacatcaccaaggataagacgagcaccgtcgaggcctgtctccccctggagctcaccaagaacgagtcctgcctgaatagcagggagacgtccttcataaccaacggcagctgtctggcgtccaggaagaccagcttcatgatggccctctgcctgagctccatctacgaggacctcaagatgtaccaggtcgagttcaagaccatgaacgcaaaactgctcatggatccaaagaggcagatctttctggaccagaacatgctggccgtgatcgatgaactcatgcaggccctgaatttcaattccgagaccgtgccccagaagagctccctggaggaacccgacttctacaaaacaaagatcaagctgtgtatcctcctgcacgccttccggatcagggccgtcaccattgaccgggtgatgtcctacctgaacgccagc

SEQ ID NO: 849 - DNA, 1596 bp, synthetic construct
  misc_feature 1..1596: note = hIL15R-alpha-B_040
  source 1..1596: mol_type = other DNA
atgtgccatcagcagctggtgatcagctggttcagcctcgtgttcctcgccagccccctcgtggccatctgggagctgaaaaaggacgtgtacgtggtggagctggactggtatcccgacgccccgggcgagatggtggtgctgacctgcgacacccccgaggaggacggcattacctggacactggaccagagcagcgaggtcctgggcagcgggaagaccctgacaattcaggtgaaggagttcggcgacgccggacagtacacgtgccacaaggggggggaggtgctgtcccacagcctcctcctgctgcacaagaaggaggatggcatctggagcaccgacatcctgaaggatcagaaggagcccaagaacaagacctttctgagatgcgaggccaagaattacagcggccgtttcacctgctggtggctcaccaccatcagcaccgacctgaccttcagcgtgaaatcctccaggggctcctccgacccgcagggagtgacctgcggcgccgccacactgagcgccgagcgggtcagaggggacaacaaggagtacgagtacagcgttgagtgccaggaggacagcgcctgtcccgcggccgaggaatccctgcccatcgaggtgatggtggacgcagtgcacaagctgaagtacgagaactatacctcgagcttcttcatccgggatatcattaagcccgatcccccgaagaacctgcagctcaaacccctgaagaacagcaggcaggtggaggtctcctgggagtaccccgacacatggtccaccccccattcctatttctccctgaccttttgcgtgcaggtgcagggcaagagcaagagggagaaaaaggacagggtgttcaccgacaagacctccgccaccgtgatctgccgtaagaacgctagcatcagcgtcagggcccaggacaggtactatagcagctcctggtccgagtgggccagcgtcccgtgcagcggcgggggcggtggaggctcccggaacctccccgtggccaccccggaccccgggatgtttccctgcctgcatcacagccagaacctgctgagggccgtgtccaacatgctgcagaaggccaggcagacactcgagttttacccctgcaccagcgaggagatcgaccacgaagacatcaccaaggacaagacctccaccgtggaggcatgcctgcccctggagctgaccaaaaacgaaagctgtctgaactccagggagacctcctttatcacgaacggctcatgcctggcctccagaaagaccagcttcatgatggccctgtgcctgagctccatctacgaggacttgaaaatgtaccaggtcgagttcaagaccatgaacgccaagctgctcatggaccccaaaaggcagatctttctggaccagaatatgctggccgtgatcgacgagctcatgcaagccctgaatttcaacagcgagaccgtgccccagaagtcctccctggaggagcccgacttctacaagaccaagatcaagctgtgcatactcctgcacgcgtttaggatcagggcggtgaccatcgatagggtgatgagctacctgaatgcctcc

SEQ ID NO: 850 - DNA, 447 bp, synthetic construct
  misc_feature 1..447: note = IL15opt-tPa6-CO01
  source 1..447: mol_type = other DNA
atggacgccatgaagcgcgggctctgctgcgtcctcctcctctgcggggccgttttcgttagccccagccaggagatccacgcccggttcaggaggggggccaggaattgggtcaacgtcatatccgacctgaagaagatcgaggacctcatacagtccatgcacatcgacgccaccctatacaccgagagcgacgtacaccccagctgcaaggtcaccgcgatgaagtgcttcctcctcgagctccaggtaatcagccttgagagcggcgacgccagtatccacgacaccgtcgagaatctgataatactggcgaataactcgctgagcagcaatgggaacgtgaccgagagcgggtgtaaggagtgcgaggagctggaggagaagaacatcaaggagttcctgcagagcttcgtgcacatcgtgcagatgttcatcaacaccagc

SEQ ID NO: 851 - DNA, 447 bp, synthetic construct
  misc_feature 1..447: note = IL15opt-tPa6-CO02
  source 1..447: mol_type = other DNA
atggacgccatgaagaggggcctctgctgcgtcctcctcctctgcggcgcggtcttcgtctccccctcccaggagatccacgccaggttcaggaggggcgccaggaactgggtcaacgtcatctccgatttgaaaaagatcgaggacttgatccaaagcatgcacatagacgccacgctctacaccgagtccgacgttcaccccagctgcaaggtcacggccatgaagtgctttctcctcgaactccaggtcatcagcttggagtccggggacgccagcatacacgacaccgtcgagaacctcatcatcctggccaacaattccctgtcttcgaacgggaatgtgaccgagtccggttgcaaggagtgcgaggagctggaggagaagaacatcaaggagttcctgcagtcattcgtgcacatcgtccagatgttcatcaatacgagc

SEQ ID NO: 852 - DNA, 447 bp, synthetic construct
  misc_feature 1..447: note = IL15opt-tPa6-CO03
  source 1..447: mol_type = other DNA
atggacgccatgaagagggggctctgctgcgtcctgctcttgtgcggggccgtcttcgtcagcccgagccaggagatccacgccaggttccggcggggcgccaggaactgggtcaacgtcatctccgacctaaagaagatcgaggacctaatccagtccatgcatatcgacgccaccctctacaccgagagcgacgttcacccctcctgcaaggtcaccgccatgaagtgcttcctcctcgagctccaggtcatctctcttgagagcggggacgcctccatccacgacaccgtcgagaacctgatcatcctggccaacaacagcctgagcagcaacggcaatgtgacggaaagcgggtgcaaggaatgcgaggagctggaggagaagaatatcaaggagttccttcagtccttcgtgcacatcgtgcagatgttcatcaacacttcc

SEQ ID NO: 853 - DNA, 447 bp, synthetic construct
  misc_feature 1..447: note = IL15opt-tPa6-CO04
  source 1..447: mol_type = other DNA
atggacgccatgaagcgcggcctctgctgcgtcctcctcctctgtggcgccgtcttcgtcagcccctcccaggagatccacgcccgcttcaggcggggagcccggaactgggtcaacgtcatcagcgatctaaagaagatcgaggatctcatccagagcatgcacatcgacgccaccctctacaccgagagcgacgtccacccctcctgcaaggtaaccgccatgaagtgcttccttttggagctccaggtaattagcctcgagtcaggcgacgccagcatccacgacacggtcgagaacctgatcatcctggccaacaatagcctgagctccaacgggaacgtgaccgagtccggatgcaaggaatgcgaggagctggaggagaagaacatcaaggagttcctgcagagcttcgtgcacatcgtgcagatgttcatcaacaccagc

SEQ ID NO: 854 - DNA, 447 bp, synthetic construct
  misc_feature 1..447: note = IL15opt-tPa6-CO05
  source 1..447: mol_type = other DNA
atggacgccatgaagagggggttgtgctgcgtcctcctcctctgcggagccgtcttcgtgtcccccagccaggagatccacgcccggttccgcagaggagcccgcaactgggtaaacgttataagcgatcttaaaaagatcgaggacctcatccagagcatgcacatcgacgcgaccctttacaccgagtccgacgtgcatccgagctgcaaggtcaccgcgatgaagtgcttcctactcgagctccaggtcatctccctcgagagcggcgacgccagcatccacgacaccgtcgagaacctgatcatactggccaataacagcctgtcctccaacgggaacgtgaccgagagcggctgtaaggagtgcgaggaactggaggagaagaacatcaaggaattcctccagagcttcgtgcacatcgtccagatgttcatcaacacctcc

SEQ ID NO: 855 - DNA, 447 bp, synthetic construct
  misc_feature 1..447: note = IL15opt-tPa6-CO06
  source 1..447: mol_type = other DNA
atggacgccatgaagagggggctttgttgtgtcctcctcctctgcggcgccgtcttcgtcagcccctcgcaggagatccacgcccggttcaggcggggcgccaggaactgggttaacgtcatctcggacctcaagaaaatcgaggacctaatccagagcatgcatatcgacgccaccctctacaccgagagcgacgtccacccctcctgcaaggtcaccgccatgaagtgcttcctcctagagctccaggtcatcagcctcgagtccggggacgcctcaatccacgacaccgtcgagaacctgattatcttggccaacaacagcctgtccagcaatggcaacgtgaccgagagcgggtgcaaggagtgcgaggagctggaagagaagaacatcaaggaattcctgcagtccttcgtgcacatagtgcaaatgttcatcaacaccagc

SEQ ID NO: 856 - DNA, 447 bp, synthetic construct
  misc_feature 1..447: note = IL15opt-tPa6-CO07
  source 1..447: mol_type = other DNA
atggacgcgatgaagaggggcctctgctgcgtccttctcctctgcggcgccgtcttcgttagcccctcccaggagatccacgccaggttcaggaggggcgcccggaactgggtcaacgtcataagcgatctcaaaaagatcgaggacctcatccagagcatgcacatcgacgccacgctctacaccgagtccgacgtgcacccctcctgcaaggtcaccgccatgaagtgcttcctcctcgagctccaggtcatctccttggagtccggcgacgcctcgatccacgataccgtcgaaaacctgatcatcctggccaacaacagcctgagcagcaatggcaacgtgaccgaatccggctgcaaggagtgcgaggagctggaggaaaagaacatcaaggagttcctgcagtcatttgtgcacatcgtgcagatgtttatcaacacctcc

SEQ ID NO: 857 - DNA, 447 bp, synthetic construct
  misc_feature 1..447: note = IL15opt-tPa6-CO08
  source 1..447: mol_type = other DNA
atggacgccatgaagcgcggcctctgctgcgtcctactcctttgcggggccgtcttcgtttcgcccagccaggagatccacgcccgatttcggaggggcgccaggaactgggtcaacgttatatccgacctcaagaagatcgaggacttgatccagtcgatgcacatcgacgccactctctatacagaaagcgacgttcacccgtcctgtaaggtcaccgccatgaagtgcttcctcctcgagctccaggtcataagcctggagtcgggcgacgcctccatccacgatacggtcgagaacctgatcatcctggccaacaacagcctgtcgtccaacggaaacgtcaccgagtcgggctgtaaggagtgcgaggagctggaggagaagaacatcaaggagttcctgcagagcttcgtgcacatcgtccagatgtttatcaacaccagc

SEQ ID NO: 858 - DNA, 447 bp, synthetic construct
  misc_feature 1..447: note = IL15opt-tPa6-CO09
  source 1..447: mol_type = other DNA
atggacgccatgaaacgcgggctctgctgcgttctactcctctgcggcgccgtcttcgtaagcccgagccaggagattcacgcccggttcaggcgcggcgccaggaactgggttaacgtaatctcggatctcaagaagatcgaggacttgatccagagcatgcacatcgacgccaccctctataccgagagcgacgttcacccctcctgcaaggtcaccgcgatgaagtgcttcctcctcgagctccaggtaatcagcttggagtccggggacgcgtccatacacgataccgtcgagaacctgatcatcttggcaaacaacagcctgagctccaacggcaatgtgacggaaagcgggtgcaaggagtgcgaggagctggaggagaagaatatcaaagagttcctgcaaagcttcgtgcacatcgtgcagatgttcatcaacaccagc

SEQ ID NO: 859 - DNA, 447 bp, synthetic construct
  misc_feature 1..447: note = IL15opt-tPa6-CO10
  source 1..447: mol_type = other DNA
atggacgccatgaagcgcggcctctgctgcgtcctcttactctgcggcgccgtattcgttagccccagccaggagatccacgccaggttcaggcggggcgccaggaactgggtcaacgttatcagcgatctcaaaaagatcgaggacctcatccagtccatgcacatcgacgcgaccctctacaccgagtcagacgtacacccctcctgcaaggtcaccgccatgaagtgcttcctcctcgagctccaggtcatcagcctagagagcggagacgccagcatccacgacaccgtcgagaatctgatcatcctggccaacaacagcctgagcagcaacgggaacgtgaccgagagcgggtgcaaggagtgcgaggagctggaggaaaagaacatcaaggagttcctgcagagcttcgtgcacatcgtgcagatgttcatcaacaccagc

SEQ ID NO: 860 - DNA, 447 bp, synthetic construct
  misc_feature 1..447: note = IL15opt-tPa6-CO11
  source 1..447: mol_type = other DNA
atggacgccatgaagaggggcctctgctgcgtacttctcctctgcggcgccgtcttcgtcagcccgagtcaagagatccacgcgaggttccggcggggcgcccgcaactgggttaacgtcataagcgatctaaagaagatcgaggatctcatacagagcatgcacatcgacgccaccctatacaccgagtccgacgtgcaccccagctgtaaggtaaccgccatgaagtgcttcctcctcgagctccaggtaattagcctggagagcggggacgcgagcattcacgataccgtcgagaaccttatcatcctggcgaataacagcctctccagcaacggcaacgtcaccgagtccgggtgcaaggagtgcgaggagctggaggagaagaacataaaggagttcctccagagcttcgtgcacatcgtgcaaatgttcatcaacaccagc

SEQ ID NO: 861 - DNA, 447 bp, synthetic construct
  misc_feature 1..447: note = IL15opt-tPa6-CO12
  source 1..447: mol_type = other DNA
atggacgccatgaaacggggcctctgctgcgtcctcctcctctgtggggccgtcttcgtgtcccccagccaggagatccacgcccggttccgcaggggcgcccggaattgggtaaacgtcatcagcgatctcaaaaagatcgaggacctcatccagagcatgcacatcgacgcaacgctctacacggagagcgacgttcaccccagctgcaaggtcaccgccatgaagtgcttccttctcgaactccaggtaatcagcctcgagtcaggcgacgccagcatccacgacaccgtcgagaacctgatcatcctggccaacaacagcctgagcagtaatggcaacgttaccgagagcggatgcaaggagtgtgaggaactggaggagaagaacatcaaggagttcctgcagagcttcgtgcacatcgtgcagatgttcatcaacaccagc

SEQ ID NO: 862 - DNA, 447 bp, synthetic construct
  misc_feature 1..447: note = IL15opt-tPa6-CO13
  source 1..447: mol_type = other DNA
atggacgccatgaagaggggactctgctgcgtcctcctcctctgcggcgccgtcttcgtcagccccagccaagagatccacgccaggttcaggaggggggccaggaactgggtcaacgtcatttccgacctcaagaagatcgaggacctcatccagagcatgcacatcgacgccaccctctacacggagtccgacgtccaccccagctgcaaggtcaccgcgatgaagtgcttcctcctcgagctccaggtaatcagcctcgagtcaggcgacgccagcatccacgacaccgtggagaacctcatcatcctggccaacaacagcctgtccagcaacggcaacgtgaccgagagtggctgcaaggaatgcgaggagctggaggagaaaaatatcaaggagttcctccagagcttcgtccacatcgtgcagatgttcatcaacaccagc

SEQ ID NO: 863 - DNA, 447 bp, synthetic construct
  misc_feature 1..447: note = IL15opt-tPa6-CO14
  source 1..447: mol_type = other DNA
atggacgccatgaagagggggctctgctgcgtcctcctcttgtgcggcgccgtcttcgtctcccccagccaggagatccacgccagattcaggaggggcgccaggaactgggtcaacgtcatcagcgacctcaagaagatcgaggacctcatccagagcatgcacatcgacgccacgctctacaccgagagcgacgtacacccctcctgcaaggtcaccgccatgaagtgctttctcctcgagctccaggttatcagcctcgagtccggggacgccagcatccacgacaccgtggagaacctgatcatcctggccaacaacagcctcagctccaacggcaatgtgaccgagagcgggtgtaaggagtgtgaggagctggaagagaagaacattaaggagtttctacagtccttcgtgcacatcgtgcaaatgttcatcaacacatcc

SEQ ID NO: 864 - DNA, 447 bp, synthetic construct
  misc_feature 1..447: note = IL15opt-tPa6-CO15
  source 1..447: mol_type = other DNA
atggacgccatgaagaggggcctctgctgcgtcctactcctctgcggggcggtcttcgttagcccgtcccaggagatccacgccaggttcaggaggggggcccggaactgggtcaacgtgatcagcgatctaaagaagatcgaggaccttatccagtcgatgcacatcgacgcgaccctctacaccgagagcgacgtccacccctcctgcaaagtcaccgccatgaagtgcttcctcctagagctccaggtcatctccctcgagagcggcgacgccagcatccacgacaccgtcgagaacctgatcatcctggccaacaacagcctgagcagcaatggcaatgtgaccgaaagcgggtgcaaggagtgcgaggagctggaggagaaaaacatcaaggagtttctgcagagcttcgtgcacatcgtccagatgtttatcaacacctcc

SEQ ID NO: 865 - DNA, 447 bp, synthetic construct
  misc_feature 1..447: note = IL15opt-tPa6-CO16
  source 1..447: mol_type = other DNA
atggacgcgatgaagaggggcctctgctgtgtcctcctcctctgcggggccgttttcgtctcccccagccaggagatccacgcgaggttccggcgcggcgcccgcaactgggttaacgtcatcagcgacctcaagaagatcgaggacctcatacagagcatgcatatagacgccaccctctacaccgagagcgacgtccaccccagctgcaaggttacagccatgaagtgcttcctcctcgagctccaggtcatcagcttggaatccggcgacgcctcgatccacgacaccgtcgagaacctgatcatcctggccaacaactccctgagcagcaatggtaacgtgaccgagtccggctgcaaggagtgcgaggagctcgaggagaagaacatcaaggagttcctgcagagcttcgtgcacatcgtgcagatgtttatcaacacctcc

SEQ ID NO: 866 - DNA, 447 bp, synthetic construct
  misc_feature 1..447: note = IL15opt-tPa6-CO17
  source 1..447: mol_type = other DNA
atggacgccatgaaaaggggcttatgctgcgtcctcctcctctgcggggccgtcttcgtcagccccagccaggagatacacgcccggttccggaggggggcgcgcaactgggttaacgtcatcagcgacctcaagaagatcgaggacctaatccagagcatgcacatagacgccaccctctacaccgaaagcgacgtgcaccccagctgtaaggtaaccgccatgaagtgcttcctcctcgagctccaggtcatcagcctcgagagcggcgacgccagcatccacgatacggtcgagaacctcatcatcctggccaacaacagcctgagctccaacgggaatgtgaccgagagcggctgcaaggagtgcgaggagctggaggagaagaacatcaaggagttcctccagagtttcgtgcacatcgtgcagatgttcattaacactagc

SEQ ID NO: 867 - DNA, 447 bp, synthetic construct
  misc_feature 1..447: note = IL15opt-tPa6-CO18
  source 1..447: mol_type = other DNA
atggacgccatgaaaagggggctctgctgcgtactcctcctttgcggggccgtcttcgtatccccgagccaggagattcacgcccggttcaggaggggcgccaggaactgggtaaacgtcatcagcgacctcaagaagatcgaggacctcatccaatcaatgcacatcgacgccacgctctacaccgagagcgacgtccaccccagctgcaaggtcaccgccatgaagtgcttcctcctcgagttacaggtcatctccctcgagtccggggacgccagcatccacgacacggtggagaacctgatcatcctcgccaataactccctgagcagcaatggcaacgtcacggagagcggatgcaaagagtgcgaggagctcgaggagaagaacatcaaagaattcctgcagagctttgtgcatatcgtgcagatgttcatcaacaccagc

SEQ ID NO: 868 - DNA, 447 bp, synthetic construct
  misc_feature 1..447: note = IL15opt-tPa6-CO19
  source 1..447: mol_type = other DNA
atggacgccatgaagcggggcctctgctgcgtcctcctcctctgcggggccgtcttcgtttcccccagccaggaaatccacgccaggtttaggaggggcgcccgcaactgggtcaacgtcatctccgatcttaagaagatcgaggacctcatccagagcatgcatatcgacgccaccctctacaccgaatccgacgtgcacccctcctgcaaggtcacagccatgaagtgcttcttgctcgagctccaggtcatctccctcgagagcggggacgccagcatccacgataccgtcgagaatctgatcatcctggccaataatagcttgagcagcaacggcaacgtgaccgagagcggctgtaaggagtgcgaggagctggaggagaagaacatcaaggagttcctgcagagcttcgtgcacatcgtgcagatgttcatcaacacgagc

SEQ ID NO: 869 - DNA, 447 bp, synthetic construct
  misc_feature 1..447: note = IL15opt-tPa6-CO20
  source 1..447: mol_type = other DNA
atggacgccatgaagcgcggcctctgctgcgtcctcctcctctgcggcgccgtcttcgtctcccccagccaggagatacacgcgaggttccggaggggggccaggaactgggtcaacgttataagcgaccttaagaagatcgaggacctcatacagtccatgcacatcgacgccacgctctacaccgagagcgacgtacacccatcctgcaaggttacggccatgaagtgcttcctccttgaactccaggtcatatccctcgagtcgggggacgcctcaatccacgacacggtggagaacctcatcatcctcgccaacaatagcctgagtagcaacggcaacgtgaccgagtccggctgcaaggaatgtgaggagctggaggagaagaacatcaaggagttcctgcagagcttcgtgcacatcgtgcagatgttcatcaatacctcc

SEQ ID NO: 870 - DNA, 447 bp, synthetic construct
  misc_feature 1..447: note = IL15opt-tPa6-CO21
  source 1..447: mol_type = other DNA
atggacgccatgaagcgggggctatgctgcgtcctcctcctttgcggcgccgtcttcgtctcgcccagccaggagattcacgccaggtttaggaggggcgccaggaactgggtcaacgtcatctcggacctcaagaagatcgaggacctcatccagagcatgcatatcgacgccaccctctataccgagtcggacgtccaccccagctgcaaggtcaccgcaatgaagtgcttcctcctcgagctccaggtcatcagcctcgagagcggcgacgcctcgatccacgataccgtcgagaatctcatcatcctggccaataattcgctgagcagcaacggcaacgtgaccgaatcaggatgtaaggagtgcgaggagctcgaggagaagaacattaaggaattcctgcagtccttcgtgcacatcgtgcagatgttcatcaacaccagc

SEQ ID NO: 871 - DNA, 447 bp, synthetic construct
  misc_feature 1..447: note = IL15opt-tPa6-CO22
  source 1..447: mol_type = other DNA
atggacgccatgaagcggggcctctgttgcgtcctcttgctttgtggcgccgtcttcgtgtcccccagccaggagatccacgctcggttcaggcgcggggccaggaactgggtcaacgtgatctccgacctcaagaagatcgaggacctcatccagagcatgcacatcgacgccaccttatacaccgagtccgacgtccatccctcgtgcaaagtcaccgccatgaagtgcttcctcttagagctccaggtcatcagcctcgagtccggcgacgcctcgatccacgataccgtcgagaacctgatcatcctggccaacaacagcctgagcagcaacgggaacgtgaccgaatcggggtgcaaggagtgcgaggagctggaggagaagaacatcaaggagttcctgcagagcttcgtgcacatagtgcagatgttcatcaacaccagc

SEQ ID NO: 872 - DNA, 447 bp, synthetic construct
  misc_feature 1..447: note = IL15opt-tPa6-CO23
  source 1..447: mol_type = other DNA
atggacgccatgaagaggggcctctgctgtgtcctcctcctctgcggagccgtcttcgtgagcccctcccaggagatccacgcccggtttcggcgcggggcccgcaactgggtcaacgtcatctccgaccttaagaagatagaggatcttatccagagcatgcacatcgacgccaccctctacacggagagcgacgtccaccccagctgtaaggttaccgcgatgaagtgctttctcctcgagctccaggtcatctccctggaatcgggggacgccagcatccacgacacggtcgaaaacctgatcatactggccaacaacagcctgtcgagcaacggcaacgtgaccgagtcagggtgtaaggagtgcgaggagctggaggagaagaacataaaggaattcctgcagtcgttcgtgcacatcgtgcagatgtttatcaacaccagc

SEQ ID NO: 873 - DNA, 447 bp, synthetic construct
  misc_feature 1..447: note = IL15opt-tPa6-CO24
  source 1..447: mol_type = other DNA
atggacgccatgaagcgcggcctctgctgcgtccttctcctctgcggcgccgtcttcgtcagccccagccaggagatccacgcacggttcaggaggggcgcccggaactgggttaacgtaatctcggacctcaagaagatcgaggacctcatccagtccatgcacatcgacgccaccctctacaccgagagcgacgtccacccgtcctgcaaggtcaccgccatgaagtgctttctcctcgagctccaggttatcagcttggagagcggcgacgccagcatccacgacacagtcgagaatctgatcatactggccaataactccctgtccagcaacggcaacgtgaccgagagcggctgcaaggagtgcgaggagctggaggagaagaacatcaaggagttcctccagagcttcgtgcacatcgtgcagatgttcatcaacaccagc

SEQ ID NO: 874 - DNA, 447 bp, synthetic construct
  misc_feature 1..447: note = IL15opt-tPa6-CO25
  source 1..447: mol_type = other DNA
atggacgccatgaagagggggctttgctgcgtactcctcctctgcggggccgtcttcgtcagccccagccaggagatccacgcccgctttaggaggggggcccgaaattgggtcaacgtcatcagcgacctcaaaaagatcgaggacttgatccagagcatgcacatcgacgccaccctttataccgagtccgacgtccacccctcctgcaaggtcaccgccatgaagtgttttctcctcgagctccaggtcatcagcctcgagagcggcgacgcttccatccacgacaccgtcgagaacctgatcatcctggccaacaacagcctgagcagcaacggcaacgtgaccgagagcggctgcaaggagtgcgaggagctcgaggagaagaacatcaaggagttcctccagagctttgtgcacatcgtgcaaatgttcatcaatacctcg

SEQ ID NO: 875 - DNA, 717 bp, synthetic construct
  misc_feature 1..717: note = IL15_RLI-CO01
  source 1..717: mol_type = other DNA
atggagactgacaccctactcctctgggtattgcttctctgggtacccgggagcaccggcgactacaaagacgacgacgacaagatcacctgtcccccgcccatgagcgtcgagcacgccgacatctgggtcaaaagctatagcctatacagcagggagaggtacatctgcaatagcggcttcaagaggaaggccggcaccagcagcctcaccgagtgtgtactcaataaggccaccaacgttgcccattggacaacccccagcttgaagtgcattagggaccccgccctcgtccatcagaggcccgccccacctagcggcgggagcggcgggggaggctccgggggcggcagtggcggcggcggatccctgcagaactgggtcaatgtgatctccgacctaaaaaagatcgaagacctgatacagagcatgcacatcgacgctaccctgtataccgagagcgatgtgcatcccagctgtaaggtcacagccatgaaatgttttctcctggagctgcaggtgatcagtctggagtcaggcgacgccagcatccacgacactgtagagaatctgatcatcctggccaacaatagcctcagcagcaacggcaacgtcaccgagagcggctgcaaggaatgcgaagaactcgaggagaagaacataaaggagttcctgcagtcctttgtgcacatcgtgcagatgtttatcaacaccagc

SEQ ID NO: 876 - DNA, 717 bp, synthetic construct
  misc_feature 1..717: note = IL15_RLI-CO02
  source 1..717: mol_type = other DNA
atggagacggataccttacttctctgggtacttctattgtgggtccccgggagcaccggggactacaaggacgacgacgacaagataacctgcccgccccccatgagcgtagaacacgccgacatctgggtcaagtcctacagcctctacagcagggagaggtacatctgcaatagcggctttaagcgtaaggccggaacgtcaagccttaccgagtgcgtccttaacaaggccaccaacgtcgcccattggaccacccccagcctcaagtgtatcagggatcccgccctcgtacaccaaaggccggcccctccatccgggggcagcggcgggggtggtagcggaggtggcagcggcggcggtggctcgctccaaaactgggtgaacgtcatcagcgacctcaagaagattgaggatctgatccagtcgatgcacatcgacgccaccctgtataccgaaagcgacgtccatcccagctgcaaagtcaccgccatgaagtgcttcctcctggagcttcaggtgatctccctggagagcggggatgcctccatccacgacaccgtggagaacctgataatccttgccaacaactccctgagctcgaatggcaacgtgaccgaatccggatgcaaagagtgcgaggagctcgaggaaaagaatatcaaggagttcctccagtctttcgtgcacatagtgcagatgttcataaatacgagc

SEQ ID NO: 877 - DNA, 717 bp, synthetic construct
  misc_feature 1..717: note = IL15_RLI-CO03
  source 1..717: mol_type = other DNA
atggaaaccgacaccctactcctttgggtactactcctttgggtccccgggtccaccggcgactacaaagacgacgacgacaagatcacctgcccgcccccgatgagcgtcgaacacgccgacatctgggtcaaatcgtacagcctctattccagggaaaggtacatttgcaacagcggattcaagcgcaaggccggcacctcgagcctcacggagtgcgtactcaacaaggccaccaacgttgcccactggaccacccccagcctcaagtgcatcagggacccagcactcgtccatcagcggccagcccctcccagcggcggctccgggggcggcgggtcaggaggcggcagcggaggcggcggaagccttcagaattgggtgaacgtgataagtgatctgaagaagattgaagatctgatccaatccatgcacatcgacgccaccctgtacaccgagtcggatgtccacccgtcctgcaaggtcacagccatgaagtgcttcctgctcgaactgcaggtcatctccttggagtcaggggacgccagcatacacgatactgtggagaaccttattatactggccaacaacagcctgtcctccaacggtaacgtgacagagtccggctgcaaggagtgcgaggagctcgaagagaaaaacataaaggagttcctccagagctttgtccatatagtgcagatgttcatcaacacctcc

SEQ ID NO: 878 - DNA, 717 bp, synthetic construct
  misc_feature 1..717: note = IL15_RLI-CO04
  source 1..717: mol_type = other DNA
atggaaaccgataccctcctcctctgggttcttctcctatgggtcccaggcagcaccggcgactacaaggacgacgacgacaagatcacctgtcccccgcccatgtccgtagagcacgcggacatctgggtcaagtcatattcactctatagcagagagaggtacatctgcaactccggattcaagaggaaggccggaaccagctcccttaccgagtgcgtcctcaacaaagccaccaacgtagcccattggacaacaccctccctcaagtgcatacgagatcccgccctcgtacaccaaaggcccgccccgcccagcgggggcagcggcggcggaggcagcggaggcggctccggaggcgggggaagcctgcagaactgggtcaacgtgataagcgacctgaagaaaatcgaagatcttatccagagcatgcacatagacgccacactgtacacggaaagcgacgtgcacccttcctgtaaggtgaccgccatgaagtgcttcctgctggagctgcaggtgataagcctcgagtccggggatgcctcgatccacgacaccgtcgagaatctgatcatcctggccaataactccctgagcagcaacgggaacgtcaccgagagcggctgcaaggaatgcgaggaacttgaggagaagaacattaaggagttcctgcaatcgtttgtacacatcgtgcagatgttcatcaacaccagc

SEQ ID NO: 879 - DNA, 717 bp, synthetic construct
  misc_feature 1..717: note = IL15_RLI-CO05
  source 1..717: mol_type = other DNA
atggagacagacaccctcctcctctgggtactcctcctctgggtacccgggagcaccggcgactacaaggacgacgacgacaagatcacctgccccccacccatgtccgttgaacacgccgatatctgggtcaagtcctacagcctctactcccgagagaggtatatctgcaactccggatttaaacggaaagccggcacctcgagcctcacagagtgcgtcctcaataaagccaccaacgtagctcactggaccaccccctcccttaagtgtattcgggatccagccctcgtccatcaaaggccggcgccgcccagcggaggtagcggcgggggcggcagcgggggaggcagcggcggcggtggaagcctacagaactgggtcaacgtcatctccgacctgaagaagatcgaggacctcatccagagcatgcacatagatgccaccctgtacaccgagagcgacgtccacccctcctgcaaggtgaccgcgatgaagtgctttctcctcgaactgcaagtgattagcctggagagcggcgatgcctccatccacgataccgtggaaaatctcatcatcctggccaataacagcctgagctcaaatggaaacgtgaccgagtccggctgcaaggagtgcgaagaactggaggagaaaaacatcaaggaattcctgcagtcctttgtgcatatcgtgcagatgttcataaacacctcc

SEQ ID NO: 880 - DNA, 717 bp, synthetic construct
  misc_feature 1..717: note = IL15_RLI-CO06
  source 1..717: mol_type = other DNA
atggagacggacaccctcctcctctgggttctcctcctttgggtccccggcagcaccggcgattacaaggacgacgacgacaagatcacctgcccgccccccatgtccgtagagcacgccgacatctgggtcaagagctacagcctctattccagggaaaggtacatttgcaactcaggcttcaaacgcaaggcaggcacctccagcttgaccgagtgcgtcctcaacaaggccaccaacgtcgcccactggaccaccccaagcttaaagtgcataagggatcccgccctagtccaccaacgcccagccccgcccagcggtggcagcggaggcggcggctccggaggcggatctgggggcggagggagcctgcagaactgggtgaacgtgattagcgatctgaagaagatcgaagacctgatccagtccatgcacatcgatgccaccctctataccgagtcagatgtgcaccctagctgcaaagtgaccgcaatgaaatgcttcctgctggagctgcaagtgatcagcctggagagcggcgatgccagcatccacgataccgtggaaaacctgatcatcctcgccaacaactcactctcctccaacggcaacgtgaccgaaagcggctgtaaggagtgcgaggaattagaagagaagaacatcaaggaattcctgcaaagcttcgtacacatcgtgcagatgttcatcaacaccagc

SEQ ID NO: 881 - DNA, 717 bp, synthetic construct
  misc_feature 1..717: note = IL15_RLI-CO07
  source 1..717: mol_type = other DNA
atggagacagacactctcctcctctgggtactcctcctctgggtacccggcagcaccggggactacaaagacgacgacgataagattacttgtcccccgcccatgtccgtcgagcacgccgacatctgggtcaagtcctacagcctctattccagggaaaggtatatctgcaacagcggtttcaagagaaaggccgggacgagttcgctcaccgagtgcgtcttgaataaagccaccaacgtcgcccactggacgaccccgagcctaaagtgcatcagagatcccgccttggttcaccaaaggccagccccaccgtccggaggctcagggggaggcggctcgggcggcggctccggcgggggcggcagcctccagaactgggtcaacgtgatctccgacctaaagaagatcgaagacctcatccagagcatgcatatcgatgccacactgtataccgaatccgacgtacaccccagctgcaaggtgaccgctatgaagtgctttctgctggagctccaggtcatcagcctggagagcggcgatgcctccattcacgataccgtcgagaacctgatcatcctggccaacaatagcctgtccagcaatgggaatgtgaccgagtccggctgtaaggagtgcgaggagctggaagagaagaacatcaaggagttcctgcagtccttcgtgcatatcgtgcagatgttcatcaacacctcc

SEQ ID NO: 882 - DNA, 717 bp, synthetic construct
  misc_feature 1..717: note = IL15_RLI-CO08
  source 1..717: mol_type = other DNA
atggagacggataccttactcctctgggtacttctcctctgggttcccggcagcaccggcgattacaaggacgacgacgacaaaatcacgtgtccgccccccatgtccgtagagcacgccgatatctgggtcaagtcctatagcctctacagccgggagcggtacatttgtaacagcggcttcaagcggaaagccggcacctcctccttaaccgagtgcgttctcaataaagccaccaacgttgcacactggacgaccccctctttgaagtgtattagggaccccgcccttgtccatcagcgtcccgccccacccagcggcgggagcggcggcggcggctccggcggaggaagcggcggcggcggcagcctccagaactgggtgaatgtgatcagtgacctcaagaagatcgaggacctgatccagagcatgcacatcgatgcaacactgtacaccgaatccgacgtacatcccagctgcaaggtgaccgcaatgaagtgtttcctgctggagctgcaggtgatctcgctggagagcggggacgcctctatccacgacacggtggagaacctcatcatcctggccaataactcgctctcctcgaatggcaacgtcaccgagagcggctgcaaggaatgcgaagaactcgaggagaagaacatcaaagaatttctgcagtccttcgtgcacatcgtgcaaatgttcatcaacacctcg

SEQ ID NO: 883 - DNA, 717 bp, synthetic construct
  misc_feature 1..717: note = IL15_RLI-CO09
  source 1..717: mol_type = other DNA
atggaaacagacacccttctcctctgggtcctactactctgggtacccggcagcaccggggactataaggacgacgacgacaaaatcacctgcccaccccccatgagcgttgagcacgccgacatctgggtaaagagctacagtctctattccagggagcgctatatctgcaacagcggtttcaagaggaaagccggcaccagcagcctcaccgagtgcgtcctcaacaaggcgacgaacgtcgcccactggaccacgcccagcctcaagtgcataagagatccggctttagtccaccagcggcccgccccgccctccgggggtagcggcggaggaggaagtgggggtgggagcggcggcgggggcagcctccagaactgggtgaacgtgatcagcgacctgaagaaaatcgaggacctgatccaatccatgcatatcgacgccaccctgtacaccgagtcagacgtgcaccccagctgcaaggtgactgccatgaagtgctttctgttagagctccaggtgatcagccttgagagcggcgacgccagcatccacgatactgtggagaatctgatcatactggccaacaactcactgtccagcaacgggaatgtgaccgagtccggttgcaaggagtgcgaagaacttgaggagaagaacataaaggagttcctgcagagcttcgtgcacatagtgcaaatgttcatcaacacctcc

SEQ ID NO: 884 - DNA, 717 bp, synthetic construct
  misc_feature 1..717: note = IL15_RLI-CO10
  source 1..717: mol_type = other DNA
atggagacggacacccttctcctctgggtcctccttctctgggtccccgggagcaccggagactacaaggacgacgacgacaagatcacctgccccccgccaatgagcgtcgaacacgccgacatttgggtcaagagttacagcttatacagcagggaaaggtacatttgcaactcgggcttcaagcggaaggccggcacgagcagcctaaccgagtgcgtcctcaacaaggcaaccaacgtcgcccactggaccaccccaagcctcaagtgtatcagggacccggccctcgtacaccaaagacccgcacccccaagtgggggcagcggagggggtggcagcggcggaggaagcgggggcggaggcagcctgcaaaactgggtgaacgtgatctcagacctgaagaaaatcgaggacctgatccagagcatgcacattgacgccaccctgtataccgagtccgatgtgcaccctagctgtaaggtgaccgccatgaagtgcttcctgctggagctgcaggtgatcagcctggagagcggagacgcctccatccacgataccgtggagaacctcatcatactggcaaataatagcctgtcctccaatgggaacgtgaccgagagcggctgtaaagagtgtgaggagctggaggagaagaatatcaaggagttcctgcagagcttcgtgcatatcgtgcaaatgtttatcaacacgagc

SEQ ID NO: 885 - DNA, 717 bp, synthetic construct
  misc_feature 1..717: note = IL15_RLI-CO11
  source 1..717: mol_type = other DNA
atggagactgacaccttactcctttgggttctactcctctgggtacccggcagcacgggagactacaaggacgacgacgacaaaatcacctgtcccccgcccatgagcgtcgagcacgcggacatctgggtaaagagctattccctctactccagggagaggtatatctgcaacagcggcttcaaaaggaaggccggcaccagctctctcacggagtgcgtactaaataaggccaccaacgtagcccactggaccaccccaagcctcaagtgcatcagggatcccgccttagttcaccagaggcccgcccctcccagcggcgggtccggcggcggcgggagtggcggcggctcaggaggaggggggagcctccagaactgggtgaacgtgatcagcgatctgaagaagatcgaggacctcatccaaagcatgcatatcgacgccacgctgtataccgagagcgacgtccacccctcctgcaaggtgaccgccatgaaatgttttctgctggaactgcaagtgatcagcctggagagcggtgacgccagcatccacgacacagtggaaaacctcatcatcctcgccaataatagcctgagcagcaacggcaacgtgaccgagtccggatgcaaggaatgcgaggagctcgaggagaagaacatcaaagagttcctgcagagcttcgtgcatatcgtgcagatgttcatcaacaccagc

SEQ ID NO: 886 - DNA, 717 bp, synthetic construct
  misc_feature 1..717: note = IL15_RLI-CO12
  source 1..717: mol_type = other DNA
atggagacagacacgttactactatgggtcctactcctctgggtccccggcagcaccggggactataaagacgacgacgacaaaatcacgtgccctccccccatgtccgtcgagcacgcagacatctgggtcaagagctactccctctacagcagggaaaggtacatctgcaacagcggcttcaagcggaaggccggtacgagcagcctcaccgagtgcgtcctcaacaaggccaccaacgtcgcacactggactacacccagccttaagtgcatccgagatccagcccttgttcaccagaggcccgccccgccttccggaggctccggcggcggcgggagcggcggtggctccggcggtggaggcagcctgcagaactgggtgaacgtgatcagcgacctgaagaagatcgaggatcttatccagagcatgcacatcgacgccaccctgtacaccgagagcgatgtgcacccgagctgcaaagtgaccgccatgaaatgcttcctgctggagctgcaagtgatcagcctcgagtccggggatgcctccatccacgacaccgtggagaacctcattatccttgccaacaacagcctgagcagcaatggcaatgtgacagaaagcggctgcaaggagtgtgaggagctggaagagaagaatattaaagagtttctccaaagctttgtgcacatcgttcagatgttcatcaacaccagc

SEQ ID NO: 887 - DNA, 717 bp, synthetic construct
  misc_feature 1..717: note = IL15_RLI-CO13
  source 1..717: mol_type = other DNA
atggaaaccgacacgctcctcctctgggttcttcttctatgggtccccggctcgaccggggattataaggacgacgacgataagatcacctgtcccccgcccatgagcgtcgaacacgcggacatttgggtcaagtcctatagcctttactcccgggagaggtacatctgtaactccggttttaagaggaaggcggggaccagcagcctaaccgagtgcgtactcaacaaggccaccaacgtcgcgcactggaccaccccgagcttaaagtgcatccgggaccccgcactcgtccatcagaggcccgccccacctagcggtggcagcgggggtggaggctccggcggcggcagcgggggcggaggaagcctgcaaaactgggtaaacgtgatcagcgatctgaagaagatcgaggacctgattcagagcatgcacatcgacgccaccctgtataccgaaagcgatgtgcaccccagctgcaaggtgaccgccatgaaatgttttctgttagagctccaggtgatctcccttgagagcggcgacgcctccattcatgataccgtggagaacctcatcatcctcgccaacaacagcctgtccagcaacggcaacgtcacggagagcggctgcaaggagtgcgaggagctggaggaaaagaatatcaaggagtttctgcagagcttcgtgcacatcgtccaaatgttcatcaacacctcc

SEQ ID NO: 888 - DNA, 717 bp, synthetic construct
  misc_feature 1..717: note = IL15_RLI-CO14
  source 1..717: mol_type = other DNA
atggagacggacaccctactactctgggtacttttactctgggtccccggcagcaccggagattacaaagacgacgacgataagatcacctgcccgcctcccatgagcgtagagcacgccgacatctgggtaaaatcatacagcctctacagccgagagaggtatatctgcaatagcggcttcaagcgaaaggccgggacgtcgtccctcaccgagtgcgtactcaataaggctaccaacgtcgcccactggaccacccccagcctaaagtgtatcagagatccggccctagtccatcagaggcccgccccgcccagcggcggctccgggggcggcgggagcggtggcgggagcggcggtggcggaagcctccagaactgggtgaacgtaatctcggacctgaagaagatcgaggacctgatccagagcatgcacatcgacgcgaccctgtataccgagtccgacgtgcaccctagctgcaaggtgaccgccatgaagtgcttcctgctggagctgcaagtgatcagcctggagagcggcgacgccagcatccacgacaccgttgagaacctgattatcctggccaacaactccctaagcagcaatggcaatgtgaccgaatccgggtgcaaggagtgtgaggagctggaggagaaaaacatcaaggaatttctgcagtccttcgtccatatcgtgcagatgtttataaatacgtcc

SEQ ID NO: 889 - DNA, 717 bp, synthetic construct
  misc_feature 1..717: note = IL15_RLI-CO15
  source 1..717: mol_type = other DNA
atggaaaccgacaccctcctcctctgggtcctcctcttgtgggttcccggcagcaccggcgattacaaggacgacgacgacaagatcacctgccccccgcccatgagcgtcgagcacgcggacatctgggtaaaaagctatagcttatacagcagggagcgttacatttgcaacagcggcttcaagcgcaaggccggcacctcctccctcaccgagtgcgtcttgaataaggccacaaacgttgcccattggaccacgccctcgctcaagtgcataagagatcccgccctcgttcaccagaggcccgccccaccctccggaggcagcggcggaggcgggtcaggaggagggtcgggcgggggcggaagcctgcagaattgggtgaacgtgatctccgacctcaagaaaatcgaggatctaatacagagcatgcatatcgacgccaccctgtataccgagagcgacgtgcatccgtcctgtaaggtgaccgccatgaagtgtttcctgctcgaactccaggtaatcagcctcgagtccggggacgccagcatacacgacaccgtcgaaaatctcatcatcctggccaacaacagcctgtcgagcaatggcaacgtgaccgaaagcggctgcaaggagtgcgaggagctggaagaaaagaacatcaaggagttcctgcagtcttttgtgcacatcgtccagatgttcatcaacactagc

SEQ ID NO: 890 - DNA, 717 bp, synthetic construct
  misc_feature 1..717: note = IL15_RLI-CO16
  source 1..717: mol_type = other DNA
atggaaaccgacaccctcctcctctgggttctcctactctgggtccccggcagcaccggagactacaaggacgacgacgataagatcacctgccccccgcccatgtccgtcgagcacgccgatatctgggtaaagtcctactcgctctactccagggaaaggtatatctgcaacagcggcttcaagcggaaggccggaaccagctccctcacagagtgcgtattaaataaggcgaccaacgtcgcacactggaccacaccctcacttaagtgcatcagggacccggccttggtacatcaacgcccggccccgccttccggcggctccggcggcgggggcagcggtggaggctccgggggcggcggcagcctgcagaattgggtgaacgtgatcagcgacctgaagaagatcgaggacctgatccagagcatgcatatcgacgccaccctgtatacagaaagcgacgtgcaccccagctgtaaggtcaccgcaatgaaatgcttcctgctggagcttcaggtcatctcgctcgaaagcggcgacgccagcatccacgacactgtcgaaaacctgataatcctggccaataacagcctgagcagcaacggcaacgtgaccgagtccggctgcaaggaatgtgaggagctggaggaaaagaatatcaaggagtttcttcaaagctttgtgcacatcgtgcagatgtttatcaacaccagc

SEQ ID NO: 891 - DNA, 717 bp, synthetic construct
  misc_feature 1..717: note = IL15_RLI-CO17
  source 1..717: mol_type = other DNA
atggagacggacaccctcctcctctgggtcctcctactctgggtccccggaagcaccggcgactacaaagacgacgacgacaagatcacctgtccccctccgatgagcgtcgagcacgccgacatttgggtcaagtcctacagcctctacagcagggaaaggtacatctgtaatagcggattcaagcggaaagcgggaaccagcagccttaccgagtgcgttcttaataaagccacgaacgtcgcccattggaccacccccagcctcaagtgcatccgagatcccgccttggtccaccaaagaccggccccacccagcggcggaagcggcggcggcgggagcgggggcggcagcggtggaggcggctccctgcagaattgggtgaacgtgatcagcgatctgaagaagatagaggacctgatccagagcatgcatatcgatgccaccctgtacaccgagtccgatgtccaccccagctgtaaggtgactgcgatgaagtgcttcctgctcgagctgcaggtgattagcctggagagcggcgacgccagcatacatgacaccgtggagaatctgatcatcctggccaataactccctgagtagcaacgggaacgtgacagagagcggctgtaaggagtgcgaagaactggaagagaagaacatcaaggagtttctgcagagcttcgtgcacatcgtgcagatgttcataaacacaagc

SEQ ID NO: 892 - DNA, 717 bp, synthetic construct
  misc_feature 1..717: note = IL15_RLI-CO18
  source 1..717: mol_type = other DNA
atggagacagacaccttactcctctgggtcctcctcttgtgggttcccggaagcaccggagactacaaggacgacgacgataagataacctgcccaccccccatgagcgttgaacacgccgacatctgggtcaagagctatagcctctacagtagggagaggtacatctgcaacagcggctttaagcgtaaggccggtacctcctcgctcaccgagtgcgtccttaacaaggccaccaacgttgcacactggaccacccctagccttaagtgcatcagggaccccgcgcttgtacaccagcgtcccgcccctccgagcggaggatccggcggcgggggcagcgggggagggagcgggggaggcggcagcctgcaaaactgggtaaatgtgatcagcgacctgaagaagattgaagacttgatacaaagcatgcacatcgacgccaccctgtacaccgagagcgacgtgcacccctcctgtaaagtgaccgcgatgaagtgcttcctgctcgagctccaggtgatctccctggagagcggggacgccagcatccacgacactgtggagaacctgatcattctcgccaataacagcctgagcagcaatgggaacgtgacggagagcgggtgcaaggaatgcgaggagctggaggaaaagaatataaaggagttcctccagagcttcgtgcacatcgtgcagatgttcatcaacacctcc

SEQ ID NO: 893 - DNA, 717 bp, synthetic construct
  misc_feature 1..717: note = IL15_RLI-CO19
  source 1..717: mol_type = other DNA
atggagacggataccctcttactttgggtactccttctttgggtccccggctccacgggcgactataaggacgacgacgacaagattacctgtcccccacccatgtccgtcgaacacgccgacatctgggtcaagtcctacagcctctacagcagagagaggtacatctgcaacagcggcttcaaaaggaaggcggggacatcgagcctcacagagtgtgtccttaacaaggccacgaacgttgcccattggaccacgccatcattgaagtgcatcagggatcccgccctagttcaccaacgtccggcaccccccagtggcggctcaggcggcggaggcagcgggggaggcagcgggggcggaggcagcctccagaactgggtcaacgtgatcagcgacctgaagaagatagaggacctgatccagagcatgcacatcgacgcgaccctgtacaccgagagcgacgtgcaccccagctgcaaggtgaccgccatgaagtgcttcctcctggagctccaggtgatttccctggaatccggcgatgccagcatccacgataccgtggagaacctgatcatcctggccaacaattcgctgagtagcaacggcaacgtgaccgagtcgggctgcaaggagtgcgaggaactggaagagaagaacataaaggagtttctccagtcctttgtgcacatcgtgcagatgttcatcaataccagc

SEQ ID NO: 894 - DNA, 717 bp, synthetic construct
  misc_feature 1..717: note = IL15_RLI-CO20
  source 1..717: mol_type = other DNA
atggagacggacaccctactactctgggtcctcctcttgtgggtccccgggtccaccggcgactacaaagacgacgacgataaaatcacctgcccaccccccatgagcgtcgagcacgccgacatttgggtaaagagctactccttgtatagccgggagaggtacatctgcaactccggctttaagagaaaagccggcacctccagcctcaccgagtgcgtcttaaacaaggccaccaacgtagcccactggactacgccctcacttaagtgtatccgcgacccggcccttgtccatcaaaggcccgccccgcccagcggaggcagcggcgggggcggcagcgggggcggatccggcggaggggggagcctgcagaactgggtgaacgtgatctcagacctgaagaagatcgaagacctcatccagagcatgcacatagacgccaccctgtataccgagtccgatgtgcatccaagttgcaaagtgacagccatgaaatgcttcctgctggagctgcaggtaatctccctggagtccggcgacgcctccatccacgacaccgtggagaacctgatcatcctggcgaacaactcccttagctcaaatggcaacgtgaccgagagcgggtgcaaagagtgtgaggagctggaggagaagaacatcaaggagtttctgcagagttttgtgcacatcgtgcagatgttcatcaataccagc

SEQ ID NO: 895 - DNA, 717 bp, synthetic construct
  misc_feature 1..717: note = IL15_RLI-CO21
  source 1..717: mol_type = other DNA
atggagacagatactttactcctctgggtactcttactttgggtcccgggaagcaccggcgactataaggacgacgacgacaagatcacctgtcccccaccgatgagcgtcgagcacgcagacatctgggtaaagagctacagcctctacagcagggagcgatacatctgcaacagcggcttcaaaaggaaagccggtaccagctcccttaccgagtgcgtactcaacaaggccaccaacgtggcccactggaccacccctagcttgaagtgtatccgggaccccgccttagtccaccagaggccagccccacccagcggtggcagcggcggaggcggctccgggggaggcagcggcgggggcggctccctgcagaattgggtgaacgtgatcagcgatctgaagaaaatcgaagacctgatccagagcatgcacatcgacgccaccctgtacaccgagtccgacgtgcaccccagctgtaaggtcaccgccatgaaatgcttcctgctggagctgcaggtgatcagcctcgagtccggggacgccagcatccacgacaccgtggagaacctgattatcctggctaacaactcgctgtccagcaacggaaatgtgaccgaatccggctgcaaggagtgcgaagaacttgaagagaagaacatcaaggagttccttcaaagcttcgtgcacatcgtgcagatgttcatcaacaccagc

SEQ ID NO: 896 - DNA, 717 bp, synthetic construct
  misc_feature 1..717: note = IL15_RLI-CO22
  source 1..717: mol_type = other DNA
atggagacagataccttgttactctgggtcctcctcctctgggtccccggcagcaccggcgactacaaggacgacgacgataaaattacctgtccaccacccatgagcgtcgagcacgccgacatttgggtcaagagctatagcctctacagccgagaaaggtacatctgcaacagcggctttaagaggaaggccgggaccagcagcctcaccgagtgcgtcttaaacaaggccaccaacgtcgcccactggaccaccccctccctcaagtgcataagggatcccgccctagtacaccaacgccccgccccaccgagcggcggcagcggaggcggcggctccggtggcggcagtgggggaggggggagcctgcagaactgggtgaacgtgatcagcgaccttaagaagatcgaagacctgatccagagcatgcacatcgacgccaccctgtacaccgagtccgacgtgcaccccagctgtaaggtcaccgccatgaagtgcttcctgcttgagctccaggtcatctcactggagagcggcgatgccagcatccacgataccgtggaaaaccttatcatcctcgcaaacaatagcctcagcagcaatgggaatgtgaccgagagcggctgtaaagagtgtgaggagctggaggaaaagaacatcaaggagttcctgcagtccttcgtgcacatcgttcaaatgtttatcaacaccagc

SEQ ID NO: 897 - DNA, 717 bp, synthetic construct
  misc_feature 1..717: note = IL15_RLI-CO23
  source 1..717: mol_type = other DNA
atggagacggacaccttactcttatgggttcttctcctttgggttcccgggtccaccggcgactacaaggacgacgacgacaaaatcacctgcccgccccccatgtccgtcgaacacgcggatatctgggtaaagtcctactccctctacagccgggaaaggtacatctgcaactccggctttaaaaggaaggcggggacctccagcctcaccgagtgtgtattaaacaaggccaccaacgtagcgcattggaccacccccagcctcaagtgcatccgggaccccgccctcgttcatcagaggccggccccaccctcaggcggctccggtggtgggggcagcggaggcggcagcggaggcggaggctccctgcagaactgggtgaacgtgatctccgacctcaagaagatcgaggacctgatccagtccatgcacatcgatgccacgctgtacacggagagcgacgtgcaccccagctgcaaggtgacggccatgaaatgcttcctactggagctccaggtgatcagcctggagtcgggcgacgcctcgatccacgacacggtcgagaatctgattatactcgccaacaacagcctgtccagcaacggcaatgtgaccgaaagcggctgtaaggagtgtgaagaactggaggagaaaaatatcaaggaattcctgcagagctttgtgcatatagtgcagatgttcatcaacaccagc

SEQ ID NO: 898 - DNA, 717 bp, synthetic construct
  misc_feature 1..717: note = IL15_RLI-CO24
  source 1..717: mol_type = other DNA
atggagacggacaccctcctactctgggtcctcctactctgggtccccggaagcacaggcgactacaaggacgacgacgacaagatcacctgcccgccccccatgagcgtcgagcacgccgatatctgggtcaagagctattcactctatagcagggagaggtacatctgcaactccggcttcaagaggaaggccggcacgagcagcttaaccgagtgtgttctcaacaaggcaacgaacgtagcccattggaccacgccctccctaaagtgcatcagggaccccgccttagtccaccagcggccggccccaccatccggagggagcggcggcggaggaagcggcggcggcagcgggggcggaggcagcctgcagaactgggtgaacgtgatcagcgacctgaagaaaatagaggacctgatccagagcatgcacatcgacgctaccctgtacaccgagtccgacgtgcaccccagctgtaaggtgaccgcgatgaagtgctttctgctggaactgcaggtgatcagcctggagagcggcgatgcctccatccacgacaccgtggagaacctgatcatccttgccaataacagcctgtcctcaaatggcaacgtgacggaaagtggctgtaaggaatgcgaggagctggaagagaaaaatatcaaggagtttctgcagagctttgtgcacatcgtacagatgtttataaacaccagc

SEQ ID NO: 899 - DNA, 717 bp, synthetic construct
  misc_feature 1..717: note = IL15_RLI-CO25
  source 1..717: mol_type = other DNA
atggagacggataccctacttctctgggtcctcctcctatgggtccccggctccaccggcgactacaaagacgacgacgacaagatcacgtgtcccccgcccatgagcgtagagcacgccgacatctgggtcaaaagctacagcctctacagcagggagcgctacatctgcaatagcggattcaagcgcaaagcgggcaccagcagcctcaccgagtgcgtcctcaataaagccaccaacgtcgcccattggaccactcccagtcttaagtgcatccgggaccccgcccttgttcaccaaagacccgccccaccgtccggcgggtccggcggcggcgggagcggaggcggcagcgggggcggagggagcctgcaaaactgggtcaacgtgatctccgacctcaagaagatcgaggacctgatccagagcatgcatatcgacgccaccctatacacggagagcgatgtccaccccagctgtaaggtgacagccatgaagtgttttctgttagagctgcaggtgatctccctggagtccggcgacgccagcatccacgacaccgtggaaaacttaataatcctggccaacaactctctgagcagcaatggcaacgtgaccgagagtggctgcaaagagtgcgaggaactggaagagaaaaatatcaaggagttcctgcagagcttcgtccatatcgtacagatgtttatcaacacgagc

SEQ ID NO: 900 - DNA, 801 bp, synthetic construct
  misc_feature 1..801: note = IL15Ra_WT_miR122-CO01
  source 1..801: mol_type = other DNA
atggcccccaggagggccagggggtgccgcaccctcggcctccccgcgctattattactcctcctgttacgaccccccgccaccagggggatcacctgtcccccgcccatgtccgtcgagcacgcggacatttgggtcaagagctactccctctattcccgggagcggtacatctgcaactccggcttcaagaggaaggccggcaccagcagcctcaccgagtgtgtcctcaataaggccaccaacgtcgcccactggaccacccccagcttgaagtgcatccgggaccccgccctcgtccaccagaggccggccccgcccagcacagtcacaaccgcaggtgtcaccccccagccggagtccctcagcccgagcggcaaggagcccgccgcctccagcccgagttcgaacaacaccgcggccaccaccgccgccatcgtgcccgggagccagctgatgcccagcaagagcccctccaccgggaccaccgagatcagcagccacgagtcgagccacgggacccccagccagaccaccgccaagaactgggagctgaccgcgtccgcgtcacatcagccccccggggtctacccccaaggccacagcgacaccaccgtggccattagcacaagcaccgtcctgctgtgcggcctgagcgcggtgagcctgctggcctgctacctgaaaagcaggcagaccccgcccctggcgagcgtggagatggaggcgatggaggccctgcccgtgacctggggcaccagctcaagggacgaggacctggagaactgtagccaccacctg

SEQ ID NO: 901 - DNA, 801 bp, synthetic construct
  misc_feature 1..801: note = IL15Ra_WT_miR122-CO02
  source 1..801: mol_type = other DNA
atggcccccaggcgggccaggggctgcaggacgttgggcctccccgccctcctcttgctcctcttgttaaggccccccgccacccggggcatcacttgtcccccgccaatgagcgtagagcacgccgacatctgggtcaagagctacagcctatactcccgggagcggtacatctgtaacagcggcttcaagaggaaggccggcaccagtagcctcacagagtgcgtcctcaacaaggccacgaacgtagcccactggaccaccccctcgctcaagtgcatcagggaccccgccctcgtgcaccagcgacccgcgccgccctccaccgtaaccaccgccggggttaccccccagcctgaaagcctgagccccagcggaaaggagcccgccgccagcagccccagcagcaataataccgccgctacgaccgcggccatcgtccctgggagccagctgatgcccagcaagtcgcccagcaccgggaccacggagatcagcagccacgagagcagccacggcacgcccagccagaccaccgccaagaactgggagctgaccgccagcgcctcccaccagccgccaggcgtctacccccagggccacagcgacaccaccgtggccatctcaaccagcacggtcctgctgtgcggcctgagcgccgtgagcctgctggcctgctacctgaaaagcaggcagaccccaccgctggcctccgtggagatggaggccatggaggccctgcccgtgacatggggcaccagcagcagggacgaggacctggagaactgctcccaccacctg

SEQ ID NO: 902 - DNA, 801 bp, synthetic construct
  misc_feature 1..801: note = IL15Ra_WT_miR122-CO03
  source 1..801: mol_type = other DNA
atggcccctcggagggcaagggggtgtcggacgctcggcctccccgccctccttctcctcctcctcctcaggccccccgccaccaggggcatcacctgccctccccccatgtcggtagaacacgccgacatctgggtcaagagctactccctctacagcagggagcggtacatttgcaacagcggctttaagaggaaggccggcactagcagccttaccgagtgcgtcctcaacaaggcgaccaacgtcgcccactggaccacgcccagcttgaagtgcatcagggaccccgccctggtccaccagaggccagccccgccctccaccgtgaccacggcgggcgtgaccccccagcccgaaagcctctcccccagcggcaaagagcctgccgcctcaagccccagcagcaacaacacggcggccaccacggccgccatcgtgcccggcagccagctgatgccaagcaagtccccgtccaccggcacaaccgagatttccagccacgagagcagccacggcaccccctcccaaaccaccgccaagaactgggagctgaccgccagcgcgtcccaccagccccccggcgtctacccgcaggggcacagcgacaccaccgtggccatctcgacctccacggtgctgctgtgcggcctgagcgccgtctcgctcctggcctgttacctgaaaagcaggcagacccctcccctcgcctccgtggaaatggaagccatggaggccctgcccgtgacctgggggaccagctcccgggacgaggacctggagaactgcagccaccatctg

SEQ ID NO: 903 - DNA, 801 bp, synthetic construct
  misc_feature 1..801: note = IL15Ra_WT_miR122-CO04
  source 1..801: mol_type = other DNA
atggccccccggcgggccaggggctgccgcaccctcggcctccccgccctcctccttctcctcctcctaagaccaccggccaccaggggaatcacctgcccacccccgatgagcgtagagcacgccgatatttgggtcaagagctacagcctctatagcagggagaggtacatctgcaactccgggttcaagaggaaggccggcacctccagcctcacggagtgcgtccttaacaaggccaccaacgtcgcccactggaccaccccgagcctcaagtgcatccgggaccccgccctcgtacaccagaggcccgccccacccagcacggtcaccacagccggtgtgaccccacagcccgaaagcctgagccccagcggcaaggagcccgccgccagcagccccagcagcaacaacaccgcggcaacgaccgccgcgatcgtgccgggcagccagctgatgcccagcaaaagccccagcaccggcacgacggaaatcagctcccacgagtcgagccacggcactccctcccagaccactgccaagaactgggagcttacagcctccgccagccaccagccccccggggtgtacccccaggggcactccgacaccaccgtggccatctccaccagcaccgtgctgctgtgcggcctgagcgccgtgagcctgctcgcctgctacctgaaaagcaggcaaacgcccccgctggcctccgtcgagatggaggccatggaagccctccccgtgacctggggcaccagcagccgggatgaagatctggagaattgcagccaccacctg

SEQ ID NO: 904 - DNA, 801 bp, synthetic construct
  misc_feature 1..801: note = IL15Ra_WT_miR122-CO05
  source 1..801: mol_type = other DNA
atggccccgaggagggccagaggctgcaggaccctcggcctccccgccctcttactcctcctcttgctccgacccccggccaccaggggcatcacctgccccccgccgatgtcggtcgaacacgccgacatctgggttaagagctattccctatactcccgggagcggtatatttgcaacagcggcttcaagaggaaggccggcaccagctccctcaccgagtgcgtcctcaacaaggccaccaacgtggcccactggaccacacccagcctcaagtgcattagggaccccgccctcgtacaccagaggcccgccccacctagcaccgtgacgaccgccggcgtcaccccccagccagagagcctgagccccagcggcaaagagcccgctgccagcagccccagcagcaataacacggcggccaccaccgccgcaatcgtgcccgggagccagctcatgcccagcaagtcccccagcaccggcaccaccgagatcagcagccatgagagctcccacgggaccccctcccagaccaccgccaagaactgggagctgaccgccagcgcctcccaccaaccgcccggcgtgtacccccaggggcacagcgacaccaccgtcgccatctcgacctcgaccgtgctgctgtgcggcctgagcgccgtgagcctcctggcgtgctacctcaagagccgccagacgcccccgctggcctccgtggaaatggaggccatggaggcgctgcccgtgacgtggggcacctccagccgagacgaggatctggaaaattgcagccaccacctg

SEQ ID NO: 905 - DNA, 801 bp, synthetic construct
  misc_feature 1..801: note = IL15Ra_WT_miR122-CO06
  source 1..801: mol_type = other DNA
atggccccccggagagctagggggtgcagaaccctcggcctccccgccctccttctcctcttgctcctccggccccccgccaccaggggcatcacctgccccccgcccatgtcggtcgagcacgccgacatctgggtcaagagctacagcctttacagcagggagaggtacatctgcaactccggcttcaaacggaaagccggaaccagctccctcaccgagtgcgtcctcaacaaggccaccaacgtggcccactggaccacccccagcttgaagtgcatccgggaccccgcgttggtccaccagaggcccgccccgccgagcaccgtgaccacagcgggagtgactccgcagcccgagagcctgtccccctcggggaaagagcccgccgcaagcagccccagcagcaacaacaccgcagccaccactgccgccatcgtccccggctcccagctgatgccctccaagagcccgagcaccgggaccaccgagatcagctcccacgagagcagccacgggaccccaagccagaccaccgccaaaaactgggagctcacagcctcggccagccaccagccccccggcgtgtacccgcagggacacagcgataccaccgtggccataagcacgagcacggtgctgctgtgtgggctgtccgcggtgtccctgctggcctgctacctgaaaagcaggcagaccccgcccctcgcaagcgtggaaatggaggcgatggaagccctcccggtgacctggggcaccagcagcagggatgaggacctggagaattgttcccaccacctg

SEQ ID NO: 906 - DNA, 801 bp, synthetic construct
  misc_feature 1..801: note = IL15Ra_WT_miR122-CO07
  source 1..801: mol_type = other DNA
atggcgccccgtagggcgaggggctgccggaccttgggcctccccgccctacttcttctcctcctcctccgcccgcccgccacgaggggtatcacctgcccgccccccatgagcgtcgagcacgccgacatttgggtaaagagctactcactctacagcagggagaggtacatctgcaacagcggctttaagaggaaggcggggacgagctccctaaccgagtgcgtcctcaacaaggccaccaacgtggcccactggaccaccccatcgctcaagtgcatacgggacccggcattagtacaccagcggcccgcgccgcccagcacggtgacgaccgcgggtgttacgcctcaacccgaaagcctgagccccagtggcaaggagcccgcggccagctccccctccagcaacaatactgccgccaccaccgccgccatcgtccccgggagccagctgatgcccagcaagagccccagcaccgggaccaccgaaatcagctcacacgaaagctcccacggtaccccctcccagaccaccgccaagaactgggagctgaccgcctccgccagccatcagccccccggtgtgtacccccaaggccatagcgacaccacggtggccatcagcaccagcaccgtgctgctctgcggcctgtccgccgtgagcctgctggcctgttatctcaagagcaggcagaccccaccgctggcgagcgtggagatggaggccatggaggccctgcccgtgacttggggcacgtccagccgagacgaggacctggagaactgctcccaccatctg

SEQ ID NO: 907 - DNA, 801 bp, synthetic construct
  misc_feature 1..801: note = IL15Ra_WT_miR122-CO08
  source 1..801: mol_type = other DNA
atggcccccaggagggccaggggctgtaggaccctcggcctcccggccctactcctccttctactcctccgcccgcccgccaccaggggcatcacctgtcccccaccgatgagcgtcgagcacgcggacatctgggtcaagagctacagcctctacagcagggagaggtacatctgtaacagcgggttcaagaggaaggccggaacctcaagcctcaccgagtgcgttctcaataaggccaccaacgtcgcccactggacgaccccctcgctcaagtgcatcagggatcccgcgttggtacaccaacggccggcccctccctccacggtgacgaccgcaggggtgactccgcagcccgagagcctctcccccagcgggaaagagccggccgcgagcagccccagcagcaataacaccgccgccacaacggccgccatcgtgcccgggagccagctgatgccctccaagtcccccagcaccggcacgaccgagatctcctcccacgagtcctcccacgggaccccgagccagaccaccgccaaaaactgggagctgacagccagcgcctcccaccagccccccggcgtgtacccgcaaggacacagcgatacgacggtggccatctccaccagcaccgtcctgctgtgcgggctctcagccgtgagcctgctggcctgttacctgaaaagcaggcagaccccgccactggccagcgtcgagatggaggcgatggaggcgctgcccgtgacctggggcacgagcagcagggacgaggacctcgagaactgctcccatcacctg

SEQ ID NO: 908 - DNA, 801 bp, synthetic construct
  misc_feature 1..801: note = IL15Ra_WT_miR122-CO09
  source 1..801: mol_type = other DNA
atggccccgaggagggcgaggggctgccgcacccttggtctgcccgccctcctcctcctcctcttgctcaggccaccggccaccagggggatcacgtgtccccctcccatgtccgttgagcacgccgacatctgggttaagtcctactccctttacagccgcgagaggtacatttgcaactccggctttaagaggaaggccggcacctccagcctcaccgagtgcgtccttaataaagccaccaacgtggcccactggaccaccccgagcctcaagtgcataagggaccccgccctcgtccatcagaggcccgcccctcccagcactgtgaccacggctggcgtcacgccgcagcccgagagcctgagtcccagcggcaaggaacccgccgcgtccagccccagcagcaataacaccgccgccaccaccgccgctatcgtgccggggtcccagctgatgcccagcaagagccccagcaccggtacgaccgagataagcagccatgagagctcgcacggcaccccctcgcagaccacagccaagaactgggagctgacggcctcggcgtcccaccagccccccggcgtgtacccccagggccactccgacaccaccgtcgccatcagcaccagcacggtcctgctctgcggcctgtcggccgtttccctgctggcctgctacctgaagtccaggcagaccccaccgctggcgtccgtggaaatggaggccatggaggctctgcccgtgacctgggggacctcctccagggacgaggatctggaaaattgcagccaccacctg

SEQ ID NO: 909 - DNA, 801 bp, synthetic construct
  misc_feature 1..801: note = IL15Ra_WT_miR122-CO10
  source 1..801: mol_type = other DNA
atggcccccaggcgagccaggggctgtaggaccctcggcctccccgcgctcctcctcctcctcctccttaggcccccggccacgcggggcataacctgccccccgccgatgtccgtcgagcacgccgacatttgggttaagagctacagcctctacagcagggagaggtacatctgcaacagcgggttcaaaaggaaggccggcaccagcagcctcacggagtgcgtccttaacaaggccaccaacgtcgctcactggaccaccccatccctcaagtgcataagggacccggccttggtacaccagaggcccgccccgccgagcaccgtgaccacggcaggagtgacaccccagccggagtccctgagcccgagcggcaaagagccggccgcctcgagccccagcagcaacaacacggccgccacaactgccgccatcgtccccggcagccagctgatgcccagcaaaagccccagcacgggcacgacggagatcagctcccacgaaagctcccacggcacccccagccagaccaccgccaagaactgggagctcaccgcctccgcgtcgcaccagccccccggcgtgtatccgcagggccacagcgacacaaccgtggccatcagcaccagcaccgtgctgctgtgcggcctgtccgccgtgtctctgctggcatgctacctgaagtcccggcagaccccgcccctggcctccgtggagatggaggccatggaggccctgcccgtgacctggggaaccagcagcagggacgaggacctggagaattgctcccaccacctg

SEQ ID NO: 910 - DNA, 801 bp, synthetic construct
  misc_feature 1..801: note = IL15Ra_WT_miR122-CO11
  source 1..801: mol_type = other DNA
atggcgcccaggcgggcgcggggctgcaggaccctcgggcttccggccctactcctcctcctcttactcaggccccccgcgacgcgaggcatcacctgccctccccccatgagcgtcgagcacgccgacatctgggtcaagagctactccttgtacagccgcgaacgttacatctgtaacagcggcttcaagaggaaggccggcacgagctccctcacggagtgcgtactcaacaaggccaccaacgtggcccactggaccacgccctccctcaagtgcatcagggaccccgccctcgttcatcagaggcctgccccaccaagcacagtgacgaccgcaggtgtgacaccccagcccgagtccctatcccccagcggcaaggagcccgccgccagcagccccagcagcaacaacaccgccgccaccacggcggccatcgtgccaggcagccagctgatgccctcaaaatcacccagcaccggcaccaccgaaatcagctcccacgagagcagccatggcacccccagccagacgaccgccaaaaactgggagctgaccgccagcgccagccaccagccccccggggtgtacccccaggggcacagcgacaccactgtggccatcagcaccagcaccgtgctcctgtgcggcttgtccgccgtctccctgctggcatgttacctgaaaagcaggcaaacgcccccgctggcctccgtggagatggaggccatggaggccctgcccgtgacctggggaaccagctcgcgggacgaagatctcgagaattgctcccatcacctg

SEQ ID NO: 911 - DNA, 801 bp, synthetic construct
  misc_feature 1..801: note = IL15Ra_WT_miR122-CO12
  source 1..801: mol_type = other DNA
atggcccccaggagggccagaggctgcaggacccttgggctccccgccctccttctcctcctcctcctaaggcccccggccacccgcgggatcacctgcccgccccccatgagcgtcgaacacgccgacatctgggtcaagtcctacagcctctacagccgggagaggtacatctgcaacagcggcttcaagcgtaaggccgggacgagctcactaacagagtgcgtcctcaacaaggccactaacgttgcgcactggacgacccccagcctcaagtgcatccgcgacccggccctcgtacaccagaggcccgccccgccgagcaccgtgaccaccgccggagtgacaccccagcctgagagcctgtctcccagcgggaaggagcccgctgcctccagcccgagcagcaacaacaccgcagcgaccaccgcggccatagtgcccggctcccagcttatgcccagcaagagccccagcacgggaaccaccgagatcagctcgcacgagtccagccacgggacaccctcccagaccaccgctaagaattgggagctgaccgctagcgcttcccaccagccccctggggtgtacccacaggggcacagcgacaccacggtcgccatcagcaccagcaccgtgctgctgtgcggcctaagcgcggtgtccctgctggcgtgttacctgaagtcgcggcagaccccacccctggccagcgtcgagatggaggccatggaggccctgcccgtgacctggggcaccagctccagggatgaagacctcgagaactgcagccaccaccta

SEQ ID NO: 912 - DNA, 801 bp, synthetic construct
  misc_feature 1..801: note = IL15Ra_WT_miR122-CO13
  source 1..801: mol_type = other DNA
atggcccccagaagggccaggggttgccgcaccctcggcctcccagccctactcctccttcttctcctccgcccgcccgccacgaggggcatcacgtgcccaccccccatgagcgtcgagcacgccgacatctgggtcaagagctacagcctctactcccgcgagcggtacatctgcaatagcgggttcaagaggaaggccggcacctccagcctcaccgagtgcgtcctcaacaaggccaccaacgtcgcccactggaccacccccagtctcaagtgcatcagggatcccgcccttgtccaccagaggcccgccccacccagcaccgtgaccaccgcgggggtaaccccccaacctgagtcgctgagccccagcggcaaggagcccgccgccagcagccccagctcaaacaataccgccgcgaccaccgccgccatcgtgcccgggagccagctgatgcccagcaagtcccccagcacgggcaccacggagatctccagccacgagagcagccacggcactccctcccaaaccaccgccaagaactgggagctgaccgcgtccgcctcgcatcagcctcccggcgtgtacccccagggccacagcgacaccacggtcgccatcagcaccagcaccgtgctcctgtgtgggctgagcgccgtcagcctgctggcctgctacctgaaaagccgccagaccccgcccctggcgtccgtcgagatggaggccatggaggccctgcccgtgacctggggaaccagctccagggacgaggacctggagaattgcagccaccacctc

SEQ ID NO: 913 - DNA, 801 bp, synthetic construct
  misc_feature 1..801: note = IL15Ra_WT_miR122-CO14
  source 1..801: mol_type = other DNA
atggccccccgaagggcgagggggtgccggaccctcggcctccccgccctcttactcctcttgctcctccgcccgcccgcgaccagggggatcacctgtccgccgcccatgtccgtcgagcacgccgacatctgggtcaagtcctacagcctctattcccgggagaggtacatctgcaacagcggcttcaaacgtaaggccgggacaagcagccttacggagtgcgtcctcaacaaagccaccaacgtggcgcattggaccacccccagcctcaagtgcatcagggatcccgccctcgttcaccagaggcccgccccacccagcaccgtgacaaccgccggggtgaccccccagcccgaatccctgtccccgagcggcaaggaacccgccgcgagcagcccctccagcaacaacaccgccgctaccaccgccgcgatcgtgccaggctcgcagctgatgcccagcaagagcccgagcaccgggacgaccgagatctccagccacgagtccagccacgggacccccagccagaccacggccaagaactgggagctcaccgccagcgcgagccaccagccgcccggagtctacccccagggccacagcgacaccaccgttgccatctccacgagcacggtgcttctgtgcggcctgtcggcggtgagtctcctggcctgctatctgaaatcccggcagaccccgcccctggccagcgtcgagatggaggccatggaggcgctgcccgtgacctgggggacctcctcgcgcgatgaggacctggagaactgctcccatcacctg

SEQ ID NO: 914 - DNA, 801 bp, synthetic construct
  misc_feature 1..801: note = IL15Ra_WT_miR122-CO15
  source 1..801: mol_type = other DNA
atggcgcccaggagggccaggggctgccggacgctcggcctccccgccctcctcctcctattactcctaaggccccccgccaccaggggaatcacctgtcccccgcccatgtccgtcgagcacgccgacatctgggtcaagagctacagcctctacagcagggagcggtacatctgcaacagcggcttcaagaggaaggccggcaccagcagcctcacggagtgcgtcctcaacaaggcgaccaacgtcgcccattggaccaccccgagcttaaagtgcatccgggaccccgcccttgtccatcaaagaccggcgcccccctccaccgtgacgacagccggggtaaccccccaacccgagtccctgtccccctccggaaaggagcccgcagccagctcccccagctccaacaacaccgccgcaaccaccgccgcgatcgtgccgggcagccaactgatgccctccaagagcccatccaccggaaccaccgagatcagcagccacgagtcaagccacggcaccccctcacagaccaccgccaaaaactgggagctgaccgccagcgccagccaccagccccccggcgtgtacccgcagggccatagcgacacaaccgtcgccatcagcacctccacggtgctgctgtgtggtctgagcgccgtcagcctgctggcctgctacctcaagagccgccagacccctcccctggcctccgtggagatggaggccatggaggccctgcccgtcacgtgggggacgagcagcagggacgaggacctggagaactgctcccatcacctc

SEQ ID NO: 915 - DNA, 801 bp, synthetic construct
  misc_feature 1..801: note = IL15Ra_WT_miR122-CO16
  source 1..801: mol_type = other DNA
atggcccccaggcgggccaggggctgtaggacactcggtctgcccgccctactcctccttctactactcaggccccccgccacacgcggcatcacctgtcccccgcccatgagcgtcgagcacgcggacatctgggtcaagagctatagcctctattcaagggagcggtacatctgcaacagcggcttcaagcggaaggccgggaccagctcgctcaccgagtgcgtcttgaacaaagccacgaacgtggcccactggaccacccccagcctcaagtgcatccgcgaccccgccctcgtccatcagaggcctgccccaccgtccacggtaaccacggccggggtcaccccccaacccgagtccctgagcccgagcggcaaggagcccgccgccagcagcccctccagcaacaacacggccgccacgaccgctgccatcgtgcccggctcccagctcatgccgagcaagtcccccagcaccggcaccacggagatcagctcccacgagtccagccacgggaccccctcccagaccaccgccaagaattgggagctgacggccagcgccagccaccagccccccggggtgtacccgcaagggcactccgacaccaccgtggccatcagcaccagcacggtgctcctgtgcggcctgagcgccgtcagcctgctggcgtgctatctgaaaagcaggcagaccccgcccctggcgtccgtcgagatggaggctatggaggccctgccggtgacctgggggaccagcagccgtgacgaggacctggagaactgtagccaccacctg

SEQ ID NO: 916 - DNA, 801 bp, synthetic construct
  misc_feature 1..801: note = IL15Ra_WT_miR122-CO17
  source 1..801: mol_type = other DNA
atggccccacgccgggcccggggctgcaggaccctcggcctccccgccctcctcctcttattgctcctccggccgcccgccaccagaggaatcacctgcccacccccgatgtccgtcgagcacgccgacatctgggtcaagagctactccctctacagcagggagaggtacatctgcaacagcggcttcaaacgtaaagccggcacctcgtccttgacggagtgcgtcttgaacaaggccaccaacgtcgcgcactggaccaccccctccctcaagtgcatcagggatcccgccctcgtacaccagaggcccgccccacccagcacggtgaccacggccggggtgacgccgcaacccgaatcactgtcaccctccgggaaggagcccgccgcgagcagccccagcagcaacaataccgccgccaccaccgcggccatcgtgccagggtcgcagctgatgcccagcaagagcccctccaccggcaccacggagatctccagccacgagagcagccacggcaccccaagccagaccaccgcgaagaactgggagctgaccgccagcgccagccaccagccccccggcgtgtacccccagggccacagcgacaccacggtggccatcagcacctcaaccgtgctgctgtgcggcctgtcggccgtctccctgctggcctgctacctgaaaagcaggcagaccccgcccctggcctccgtcgagatggaggcaatggaggccctgcccgtgacctgggggaccagcagccgggacgaggacctcgagaactgcagccaccacctc

SEQ ID NO: 917 - DNA, 801 bp, synthetic construct
  misc_feature 1..801: note = IL15Ra_WT_miR122-CO18
  source 1..801: mol_type = other DNA
atggccccgcggagggccaggggctgccgaaccttaggcctaccagccctcctcctccttctcctcctcaggccccccgccaccagggggatcacgtgcccgccccccatgagcgtagaacacgccgatatctgggtcaagagctactccctctactcccgcgagaggtacatctgtaactccggcttcaagaggaaggccgggacctccagcctcacggagtgtgtcctcaataaggccaccaacgtcgcccactggaccacccccagcttaaagtgcatccgcgaccccgcactcgttcaccagaggcccgccccgcccagcaccgtcacgaccgcaggcgtgacgccccagcccgaaagcctgtcaccaagcggcaaggagccggccgccagctcaccaagttccaacaacaccgcggcgaccaccgccgcgatcgtgcccggcagccagctgatgccgagcaagagcccctccacggggaccaccgagatctccagccacgaatccagccacggcaccccctcccagaccaccgccaagaactgggagctgacggcctccgccagccaccagccccccggcgtgtacccccaggggcacagcgacacgaccgtggccatctccacctccaccgtcctgctgtgcgggctcagcgccgtgagcctgctggcctgctacctgaagtccaggcagacccctcccctggccagcgtggaaatggaggccatggaggcgctgcccgtgacatggggcacctccagcagggacgaggacctggagaattgctcgcaccacctg

SEQ ID NO: 918 - DNA, 801 bp, synthetic construct
  misc_feature 1..801: note = IL15Ra_WT_miR122-CO19
  source 1..801: mol_type = other DNA
atggccccgcggagggcccggggttgccggaccctcggcctccccgccctcctactcctcctattgttacgcccgcccgccaccagggggatcacctgtccccctcccatgagcgtcgagcacgcggacatctgggtcaaaagctacagcttgtatagccgcgaaaggtacatctgcaactccggctttaagaggaaggccggcacgtcctccctcaccgagtgcgtcctcaacaaggccaccaacgtcgcccattggacgaccccctccctcaagtgcatcagggaccccgccctcgtccatcagaggccagccccaccgtccacggtcaccaccgccggggtcacgccccagcccgaatccctgagcccctcaggcaaggagcccgccgcgagcagccccagctccaataacacggccgcgaccaccgcggccatcgtgcccgggtcccagctgatgcccagcaagagccccagcaccggcaccacggagatctccagccacgagagctcccacggcacccccagccagacgaccgctaagaactgggagctgaccgcctcggccagccaccaaccccccggcgtctacccccagggccatagcgacaccaccgtcgccatcagcaccagcacggtcctgctgtgcgggctgagcgcagtgagcctgctcgcctgctaccttaagagcaggcagaccccgcccctggccagcgtggagatggaggccatggaggccctgcccgtcacttggggaacgagcagccgcgacgaagacctggagaactgcagccaccacctg

SEQ ID NO: 919 - DNA, 801 bp, synthetic construct
  misc_feature 1..801: note = IL15Ra_WT_miR122-CO20
  source 1..801: mol_type = other DNA
atggccccccgtcgggccaggggctgccggaccctcgggctcccggcccttttgctcttgctcctccttaggccccccgccacccgaggcatcacctgcccgccccccatgtccgttgagcacgcggacatctgggtcaagtcctactccctctatagcagagaacggtacatctgcaacagcggattcaagcggaaggcgggcaccagcagcctcaccgagtgcgtcctcaacaaggccaccaacgtcgcccactggaccaccccctccctcaagtgcatcagggacccggccctcgttcatcagaggcccgcaccccccagcaccgtgaccaccgccggtgtcaccccgcagcccgaaagcctgagccctagcggcaaggagcccgccgccagcagccccagcagcaacaacactgccgcgacgaccgccgccatcgtgcccggaagccagctgatgccctccaaatcgcccagcaccggcacgaccgagataagcagccacgagagcagccacgggacgcccagccaaacgacggccaagaattgggagctgaccgcttccgcctcccaccagccccccggggtgtacccacaggggcatagcgacaccaccgtggccatcagcacctcgaccgtgctgctgtgtggtctgagcgccgtgtcactgctggcctgctacctgaagtcccgtcagaccccacccctggcctcggtggagatggaagccatggaggccctgcccgtgacctggggcaccagcagcagggacgaggacctggagaactgctcccaccacctg

SEQ ID NO: 920 - DNA, 801 bp, synthetic construct
  misc_feature 1..801: note = IL15Ra_WT_miR122-CO21
  source 1..801: mol_type = other DNA
atggcccctaggagggcccggggctgccggacgttgggcctccccgccctactcctcttgttgctcctcaggcccccggccacccgaggcatcacctgccctccccccatgagcgtcgagcacgccgacatctgggtaaagagctacagcttgtactccagggaacggtatatctgcaatagcgggttcaagagaaaggccgggactagcagcctcaccgagtgcgtactcaacaaagccaccaacgtcgcccactggacgaccccgtccctaaagtgcatcagggaccccgccctcgtacaccaaaggcccgccccgccgagcaccgtgaccaccgccggggtgacccctcaaccggagagcctgtcacccagcggcaaagagcccgccgccagctcccccagcagcaacaacaccgccgccacgacggcggccatcgtgcccggcagccagctcatgccgtcgaaaagccccagcacggggaccacggagatctccagccacgaatcctcccacgggaccccgagccaaaccacggccaagaactgggagctgaccgccagcgccagccaccagccccccggcgtgtacccccagggccacagcgacacgacggtggccatcagcaccagcacagtcctgctgtgcgggctgtcggccgtgagcctcctggcatgctacctgaaaagccggcagaccccgccactggccagcgtggagatggaggccatggaggctctcccggtgacctggggcacctccagcagggacgaggacctggagaactgcagccaccacctg

SEQ ID NO: 921 - DNA, 801 bp, synthetic construct
  misc_feature 1..801: note = IL15Ra_WT_miR122-CO22
  source 1..801: mol_type = other DNA
atggccccacgaagggcccggggctgtcgcaccctcggcctccccgccctcctcctcctactcctcctcaggccgcccgccaccagaggcatcacgtgccctccccccatgtcggtcgagcacgccgatatctgggtcaagagctacagcctctactccagggagaggtacatctgcaactccgggtttaagaggaaagccgggaccagcagcctcaccgagtgcgtcctcaacaaggcgaccaacgtcgcccactggacaaccccctcgctcaagtgtatcagggaccccgccctagttcaccagcggcccgccccacccagcactgtgaccactgccggcgtaaccccccagcccgagagcctcagccccagcggcaaggaacccgccgccagcagtcccagcagcaacaatacggccgccactacggctgccatcgtccccggcagccagctgatgcccagcaagagcccgagcaccgggaccaccgagatcagcagccacgagagctcccatggcacacccagccagaccaccgccaagaactgggagctgaccgcctccgcctcccaccagccccccggggtgtacccccagggccacagcgacaccaccgtggccatcagcaccagcaccgtgctgctgtgtggtctgagcgccgtgtccctgctcgcgtgttacctcaagagcaggcagacgcctcccctggccagcgtggagatggaggccatggaggccctgcccgtgacctggggcaccagctccagggacgaggacttggagaactgctcccaccacctg

SEQ ID NO: 922 - DNA, 801 bp, synthetic construct
  misc_feature 1..801: note = IL15Ra_WT_miR122-CO23
  source 1..801: mol_type = other DNA
atggccccccggagggcccgggggtgccgcacccttgggctccccgccctcctccttctcctcctcttaagaccgcccgccaccaggggcatcacgtgtcccccgcccatgtccgttgagcacgcggacatctgggtcaagtcctacagcctctacagccgcgagaggtacatctgtaacagcggcttcaaacggaaggccgggacctccagcctcacggagtgcgtcttgaacaaagccaccaacgtggcccactggacgacccccagtctcaagtgtatacgggacccggcccttgtacaccagaggcccgccccaccgtccaccgtgactactgccggcgtgacgccccaaccggagtccctgagcccctccggcaaggagcccgccgcctcgagcccaagcagcaacaacaccgcagctaccaccgccgccatcgtgcccggctcccagctgatgccctccaagagcccctctaccggtaccaccgagatctccagccacgaatcgtcgcacgggacccccagccagaccacggccaagaactgggagctgacggcctccgccagccaccagccccccggcgtgtacccccaggggcactccgacacaaccgtggccatctccaccagcaccgttctgctgtgcggcctgagcgccgtctccctgctcgcctgctatctgaaaagcaggcagaccccgcccctggcctccgtggagatggaggccatggaggccctcccggtcacgtggggcacgtcgagccgtgacgaggacctcgagaactgctcacaccacctg

SEQ ID NO: 923 - DNA, 801 bp, synthetic construct
  misc_feature 1..801: note = IL15Ra_WT_miR122-CO24
  source 1..801: mol_type = other DNA
atggcgcccaggagggcgcgaggctgcaggaccctcggcctccccgccctcctcctcctactcctcctcaggccccccgccaccagggggataacctgcccaccccccatgagcgtagagcacgcggacatctgggtcaagagctacagcctctacagcagggagaggtacatctgcaacagcggctttaagcggaaggccggcaccagctcgcttacggagtgtgtcctcaacaaggccaccaacgtcgcccactggaccacccccagcctcaagtgcatcagggacccggccctcgtccatcagaggcccgccccacccagcaccgtcaccacagccggggtaacaccccagcccgagagcctgagcccgagcggcaaggagcctgccgcctcctccccgagcagcaacaataccgccgcaacgactgccgccatcgtgccgggctcacagctgatgccaagcaagagccccagcaccggcaccaccgagatcagcagccatgagagctcgcacggcacccccagccaaaccaccgccaagaactgggagctgaccgccagcgcctcccaccagccccccggcgtgtacccccagggccactcggataccaccgtggccataagcacctccacggtgctgctctgtggcctcagcgccgtgtccctgctggcctgctatctgaaaagccggcagaccccacccctggccagcgtggagatggaggccatggaggccctgcccgtgacctggggtacgtcctccagggacgaggatctcgagaactgctcccaccacctg

SEQ ID NO: 924 - DNA, 801 bp, synthetic construct
  misc_feature 1..801: note = IL15Ra_WT_miR122-CO25
  source 1..801: mol_type = other DNA
atggccccccggagggcccgagggtgccggacgctcgggttacccgcccttctcctcctattgctcctccgcccacccgccacgaggggtatcacctgccctccgcccatgagcgtcgagcacgcggacatctgggtcaagtcctacagcctctacagccgcgagcggtacatctgcaacagcggtttcaagaggaaggcagggaccagctccctcacggagtgcgtcctcaacaaggccaccaacgtcgcgcactggaccaccccgagcctcaagtgcatcagggaccccgccctcgtccaccagaggccagccccgcccagcaccgtcaccaccgccggcgtgacccctcagcccgaaagcctgagccccagcggcaaggaaccggcggccagctccccaagcagcaacaacacggccgccaccaccgccgccatcgtgcccgggagccagctgatgcccagcaagtccccgagcacgggcaccaccgagatctccagccacgagtcctcccacggcacccccagccagaccaccgccaagaactgggagctgacggccagcgccagccaccagccgccgggcgtctacccgcaggggcactccgataccaccgtagccatatccaccagcaccgttctgctgtgtggcctctccgccgtctccctgctggcctgctacctgaaaagcaggcagaccccaccactggccagcgtggagatggaagccatggaggccctgcccgtgacctggggcacctccagccgcgacgaggacctcgagaattgctcccatcacctg

SEQ ID NO: 925 - DNA, 447 bp, synthetic construct
  misc_feature 1..447: note = IL15opt-tPa6-CO26
  source 1..447: mol_type = other DNA
atggacgccatgaagcgcggtttgtgttgcgtcctccttctctgcggggcggtcttcgtcagcccgtcccaggagatccacgccaggttcaggcggggagcccgcaactgggtcaacgttatcagcgatcttaaaaagatcgaggacctcatccaatcgatgcacatcgacgccacgttatacacggagtccgacgtgcaccccagctgcaaggtcaccgccatgaagtgcttcctcctcgagctccaagtcatatcgctcgaaagcggagacgcgagcatccacgacaccgtcgagaacctgatcatcctggccaacaacagcctgtcgagcaacgggaacgtgaccgagagcgggtgcaaggagtgcgaggagctggaggagaagaacatcaaggagttcctgcagagcttcgtgcacatcgtccagatgttcataaacaccagc

SEQ ID NO: 926 - DNA, 447 bp, synthetic construct
  misc_feature 1..447: note = IL15opt-tPa6-CO27
  source 1..447: mol_type = other DNA
atggacgccatgaaaagggggctctgctgcgtcctcctcctctgcggggccgtcttcgtgagccccagccaggagatccacgcccggttcaggaggggggcccggaattgggtaaacgtcatcagcgacctcaagaagatcgaggacctcatccagtccatgcacatcgacgccacgctctataccgagagcgacgtccacccaagctgcaaggtcaccgccatgaagtgcttcctcctcgagctccaggtcatcagcctcgagagcggcgacgccagcatccacgacaccgttgagaacctcatcatcctggccaacaatagcctctcctcaaacggcaacgtgaccgagagcgggtgcaaagagtgtgaggagctggaggagaaaaacatcaaggagttcctgcagagcttcgtgcacatcgtgcagatgttcatcaacaccagc

SEQ ID NO: 927 - DNA, 447 bp, synthetic construct
  misc_feature 1..447: note = IL15opt-tPa6-CO28
  source 1..447: mol_type = other DNA
atggacgcaatgaagaggggcctctgttgcgtcctactcttgtgcggggccgtcttcgtcagccccagccaggagatccacgcgaggttccgcaggggcgcgaggaattgggtcaacgtcatctcggacctcaagaaaatcgaggacctcatccagtcgatgcacatcgacgccaccctctacaccgagtccgacgtgcatcccagttgcaaggtcaccgccatgaagtgcttcctcctcgagctccaggtcatctcccttgagtccggcgacgccagtatccacgacacggtcgagaacctgatcatcctggccaacaacagcctgtccagcaacggcaacgtgaccgagtccggctgcaaggagtgcgaggagctggaggagaagaacatcaaggagttcctccaaagcttcgtgcacatcgtgcagatgttcataaataccagc

SEQ ID NO: 928 - DNA, 447 bp, synthetic construct
  misc_feature 1..447: note = IL15opt-tPa6-CO29
  source 1..447: mol_type = other DNA
atggacgccatgaagaggggcctctgttgcgtccttctcctctgcggggccgtcttcgtcagccccagccaggagatacacgcaaggttccgcaggggggcccgcaactgggtcaacgtgatcagcgacctcaagaaaatcgaggacctcatacagagcatgcacatcgacgccaccctctacaccgagagcgacgtccaccccagctgtaaggtcaccgccatgaagtgcttcctcttggaactccaggtcatcagcctcgagagcggcgacgcctcgatccacgacaccgttgagaacctgatcatcctggccaacaacagcctcagctccaacggcaatgtgacggagagcggctgcaaggagtgcgaggagctggaggagaagaacatcaaagagttcctccagtccttcgtgcacatcgtgcagatgttcatcaacaccagc

SEQ ID NO: 929 - DNA, 447 bp, synthetic construct
  misc_feature 1..447: note = IL15opt-tPa6-CO30
  source 1..447: mol_type = other DNA
atggacgccatgaagaggggcttatgctgcgtcctcctcctgtgcggagccgtcttcgtcagccccagccaggagatccacgccaggttcaggcgcggcgccaggaactgggtcaacgtcatctccgacctcaaaaagatcgaggacctcatacagagcatgcacatcgacgccacgctctacacggagtcagacgtccaccccagctgcaaggtaaccgccatgaagtgtttcctcctcgagctccaggtcatcagcttggagagcggggacgcctccatccacgacacggtagagaacctcatcatcctggccaacaacagcctgagctccaacggcaacgtgacggagtccggctgcaaggagtgcgaggaactggaggagaagaacatcaaggagttcctgcagtccttcgtgcacatcgtgcagatgttcatcaacacgtct

SEQ ID NO: 930 - DNA, 447 bp, synthetic construct
  misc_feature 1..447: note = IL15opt-tPa6-CO31
  source 1..447: mol_type = other DNA
atggacgccatgaagagggggctttgttgcgtactcctcctttgcggggccgtcttcgtaagccccagccaggagatacacgcccggtttaggaggggagcgcgcaactgggtcaacgtcatctccgacctcaagaagatcgaggatctcattcagtcgatgcacatcgacgccaccctctacaccgagtccgacgtccaccccagctgcaaggtaaccgcaatgaagtgtttcctactcgagctacaggtaatctctctcgagtccggggacgcctcgatccacgacaccgtagagaacctcatcatactggccaacaattcgctgtcctccaacgggaatgtgaccgagagcggctgtaaggagtgcgaggagctggaggagaagaacataaaggagttcctgcagagcttcgtgcacatcgtgcaaatgttcatcaacaccagc

SEQ ID NO: 931 - DNA, 447 bp, synthetic construct
  misc_feature 1..447: note = IL15opt-tPa6-CO32
  source 1..447: mol_type = other DNA
atggacgccatgaagaggggcctctgttgcgtccttctcttgtgcggggccgtcttcgtcagcccctcgcaggagatacacgcgcgattcaggaggggggccaggaactgggtcaacgtcataagcgatctaaagaagatcgaggacctcatccagagcatgcacatagacgccaccctctacaccgagagcgacgtgcacccctcctgcaaggtaaccgccatgaagtgcttcctcctcgagttgcaggtcatctcgctcgagagcggagacgcctccatccacgacaccgtcgagaatctcatcatccttgccaacaactcactcagcagcaacggaaacgtcaccgagtccggctgcaaagagtgcgaggagctggaggagaaaaacatcaaggagttcctgcagagcttcgtgcacatcgtgcagatgttcatcaacaccagc

SEQ ID NO: 932 - DNA, 447 bp, synthetic construct
  misc_feature 1..447: note = IL15opt-tPa6-CO33
  source 1..447: mol_type = other DNA
atggacgccatgaagaggggcctctgctgtgtcctcctcctctgtggcgccgtcttcgtcagccccagccaggagatccacgcccgcttcaggaggggcgcccggaattgggtcaacgtcatcagcgacctaaagaagatcgaggatctcatacagagcatgcacatcgacgccacgctctacacagagagcgacgtccacccgagctgcaaggtaaccgccatgaagtgcttcctcctcgagcttcaggtcatctcgctcgagagcggggacgctagcatacacgatacagtcgagaacctgatcatcctggccaacaactctctctccagcaacgggaacgtgaccgagagcgggtgcaaggaatgcgaggagctggaggagaagaacatcaaggagttcctccaaagctttgtgcacatcgtgcagatgtttatcaacaccagc

SEQ ID NO: 933 - DNA, 447 bp, synthetic construct
  misc_feature 1..447: note = IL15opt-tPa6-CO34
  source 1..447: mol_type = other DNA
atggacgccatgaagcgcggcctctgctgtgtactcctcttgtgcggcgccgttttcgtcagcccctcccaggagatccacgcgcgattcaggaggggggccaggaactgggtcaacgttatcagcgatctcaagaagatcgaggacttgatccagagtatgcacatcgacgccacgctctacaccgagagcgacgtgcacccctcgtgcaaggttaccgccatgaagtgcttcctcctcgagctccaggtaatcagcctcgagtccggggacgccagcatccacgacacagtcgagaacctgatcatcctggccaacaacagcctgtcgagcaacggaaacgtgaccgagagcgggtgcaaggaatgcgaggagctggaggagaagaatataaaggagttcctgcagtcctttgtgcatatcgtgcagatgttcatcaacacgagc

SEQ ID NO: 934 - DNA, 447 bp, synthetic construct
  misc_feature 1..447: note = IL15opt-tPa6-CO35
  source 1..447: mol_type = other DNA
atggacgcgatgaagcggggcttatgctgtgtcctccttctctgcggcgccgtcttcgtgagcccgtcccaggagatccacgccaggtttcgccggggcgccaggaactgggtcaacgtcatcagcgacctcaaaaagatcgaggacctcatccagtccatgcacatcgacgccaccctttacaccgagtccgacgtgcaccccagctgcaaggtcaccgccatgaagtgcttcctcctcgagctccaggtcatcagccttgagtccggcgacgcgagcatccacgacaccgtcgagaacctgatcatcctggccaacaacagcctctcgagcaacgggaatgtgacggagtcgggatgtaaggagtgcgaggagctggaggagaagaacatcaaggagtttcttcagtcctttgtgcacatagtgcagatgtttatcaacaccagt

SEQ ID NO: 935 - DNA, 447 bp, synthetic construct
  misc_feature 1..447: note = IL15opt-tPa6-CO36
  source 1..447: mol_type = other DNA
atggacgccatgaagagggggctctgctgtgtcttgctcctctgcggcgccgttttcgtcagcccgagccaagagatccacgcgcggtttcggcgcggcgcccggaactgggtcaacgtcatatccgacctaaagaagatcgaggacctcatccagagcatgcacatcgacgccaccctctacaccgagtccgacgtccaccccagctgcaaggttacggccatgaagtgcttcctcctcgagctccaggtcatcagcttagagagcggggacgccagcatccacgacaccgtcgagaatctgatcattctggcgaacaacagcctgagcagcaatgggaacgtgaccgagtcggggtgtaaggagtgcgaggagctggaggagaagaacatcaaggagtttctgcagtccttcgtgcacatcgtgcagatgtttatcaacacctcg

SEQ ID NO: 936 - DNA, 447 bp, synthetic construct
  misc_feature 1..447: note = IL15opt-tPa6-CO37
  source 1..447: mol_type = other DNA
atggacgccatgaagcgggggctctgctgcgtactcctcctctgcggcgccgtcttcgtcagccccagccaggagatacacgcccgctttcggaggggcgctaggaactgggttaacgtaatctccgacctcaagaagatcgaggacctcatccagagcatgcacatcgacgccaccctctacaccgaaagcgacgtccacccgagctgcaaggtcacggccatgaagtgttttctcctcgagctccaggttatcagccttgagagcggcgacgcctccatccacgacaccgtcgagaatctgatcatcctggccaataacagcctcagctcgaacggcaacgtgaccgagagcgggtgcaaagagtgcgaggagctggaggagaagaacatcaaggagttcctgcagtccttcgtgcatatcgtgcagatgttcatcaacaccagc

SEQ ID NO: 937 - DNA, 447 bp, synthetic construct
  misc_feature 1..447: note = IL15opt-tPa6-CO38
  source 1..447: mol_type = other DNA
atggacgccatgaagcgcggcctctgctgcgtcctactcctttgcggggccgtattcgtcagccccagccaggagatccacgcccggttccggaggggcgctaggaactgggttaacgtgatcagcgacttgaagaagatcgaggacctcatccagagcatgcacatcgacgcgaccttgtataccgagtcggacgtccaccccagctgcaaggtcaccgccatgaagtgctttctcctcgagctccaggtcatctctctcgaaagcggcgacgccagcatccacgacaccgtcgagaacctgatcatcctggccaataactccctgtcctccaacggcaatgtgacggagtccgggtgcaaggagtgcgaggagctcgaggagaagaacatcaaggagttcctccaaagctttgtgcacatcgtgcagatgttcatcaacaccagc

SEQ ID NO: 938 - DNA, 447 bp, synthetic construct
  misc_feature 1..447: note = IL15opt-tPa6-CO39
  source 1..447: mol_type = other DNA
atggacgccatgaagaggggcctttgctgcgtcttgctcctctgcggcgccgtattcgtgagcccatcccaggagatccacgccaggttccgcaggggggcccgcaactgggtcaacgtcatcagcgaccttaaaaagatcgaggacctcatccagtccatgcacatcgacgcaaccctatacaccgagtcggacgtgcatcccagttgcaaggtaaccgccatgaagtgctttctcctcgagctccaggtaatcagcttagagagcggagacgccagcatccacgacacggttgaaaacctcattatcctggccaacaactccctgtccagcaacggcaacgtgaccgagtcggggtgcaaggagtgcgaggagctggaggagaagaacatcaaggagttcctgcaaagcttcgtgcacatcgtgcagatgttcatcaacaccagc

SEQ ID NO: 939 - DNA, 447 bp, synthetic construct
  misc_feature 1..447: note = IL15opt-tPa6-CO40
  source 1..447: mol_type = other DNA
atggacgccatgaagaggggcctctgctgcgtcctcctcctctgcggcgccgtcttcgtgtcgcccagccaggagatccacgccagattccggcgaggggccaggaactgggtcaacgtcattagcgaccttaagaagatcgaggacctcatccagagcatgcacatcgacgccacgctctacaccgagtccgacgtccaccccagctgcaaggtcaccgccatgaagtgtttcctcctcgagctccaggtcatctccctagagagcggggacgcctcgatacacgacaccgttgagaacctgatcatcctcgcgaacaactccctcagctccaacgggaacgtgaccgagagcgggtgtaaggaatgcgaggagctggaggagaagaacatcaaagagtttctgcagagcttcgtgcacatcgtgcagatgttcatcaacacgagc

SEQ ID NO: 940 - DNA, 447 bp, synthetic construct
  misc_feature 1..447: note = IL15opt-tPa6-CO41
  source 1..447: mol_type = other DNA
atggacgcgatgaagaggggcctctgttgcgtcctcctcctctgcggggccgtcttcgtgagccccagccaggagatccacgcgaggttcaggcggggcgccaggaactgggtcaacgtcatcagcgatctaaagaagatcgaggacctcatccagtccatgcacatcgacgccaccctatataccgagagcgacgttcaccccagctgcaaggttaccgccatgaagtgcttcctcctagagctccaagtcatcagcctcgaaagcggcgacgcctccatccacgacaccgtcgagaacctgatcatcctcgccaataatagcctgtccagcaacgggaatgtgacggagtcgggatgcaaggagtgcgaggagctggaggagaagaacatcaaagagttcctccagagctttgtgcacatcgtgcagatgttcatcaataccagc

SEQ ID NO: 941 - DNA, 447 bp, synthetic construct
  misc_feature 1..447: note = IL15opt-tPa6-CO42
  source 1..447: mol_type = other DNA
atggacgccatgaagaggggcctctgctgcgtcctccttctctgcggggcggtgttcgtgagccccagccaggagatccacgcccgcttccgccgcggcgcccggaactgggtcaacgtcatcagcgaccttaagaagatcgaggacctaatccagagcatgcacatcgacgccacgctatataccgagagcgacgtgcaccccagctgcaaggtcaccgccatgaagtgcttcctcctcgagctccaggtcatcagcctcgagagcggcgacgccagcatccacgacaccgttgagaacctgatcatcctggccaacaacagcctcagctccaacggcaacgtgaccgagagcggctgcaaggagtgcgaggagctcgaggagaagaacatcaaggagttcctccagtccttcgtgcacatcgtgcagatgttcatcaacacctcc

SEQ ID NO: 942 - DNA, 447 bp, synthetic construct
  misc_feature 1..447: note = IL15opt-tPa6-CO43
  source 1..447: mol_type = other DNA
atggacgccatgaagcgggggctctgctgcgtcctcctcctttgcggggccgtcttcgtcagccccagccaagagatacacgccaggttccgccgcggggccagaaactgggttaacgtaatcagcgacctcaagaagatcgaggaccttatccagagcatgcatatcgacgccacgctctacacggagagcgacgtccatcccagctgcaaggtcaccgccatgaagtgttttctcctcgagcttcaggtcatttccttggaaagcggggacgcctccatccacgacacggtcgaaaacctcatcatcctggccaacaacagcctctcctccaacgggaacgtgaccgagtccgggtgcaaggaatgcgaggagctggaggagaaaaacatcaaggagtttctgcagagctttgtccacatcgtgcagatgttcatcaacaccagc

SEQ ID NO: 943 - DNA, 447 bp, synthetic construct
  misc_feature 1..447: note = IL15opt-tPa6-CO44
  source 1..447: mol_type = other DNA
atggacgccatgaagcggggtctgtgttgcgtcctcctcctctgcggagcggttttcgttagccccagccaggagatccacgcccggttcaggaggggcgcccgcaactgggtaaacgtcatctccgaccttaagaagatcgaggacctcattcagagcatgcacatcgacgccaccctctacacggagtccgacgtgcacccctcctgtaaggtcaccgccatgaagtgctttctcctcgagctccaggtcatcagcctggagagcggggacgcctccatacacgacacggtggagaacctaatcatcctagccaacaacagcctgagctcgaacggaaatgtgaccgaaagcggctgcaaggagtgcgaggaactggaggagaagaacatcaaggagttcctgcagagcttcgtgcacatcgtccagatgttcataaacaccagc

SEQ ID NO: 944 - DNA, 447 bp, synthetic construct
  misc_feature 1..447: note = IL15opt-tPa6-CO45
  source 1..447: mol_type = other DNA
atggacgcgatgaagaggggcctctgctgcgtcctcctcctctgcggcgccgttttcgtcagccccagccaggagatacacgcccggtttcggaggggcgccaggaactgggttaacgtcatctccgatctcaagaagatcgaggacctaatccagagcatgcacatcgacgccacgctctacacggaatccgacgtccaccccagctgcaaggttaccgccatgaagtgcttcctcctcgagctccaggtcatcagcttagagagcggggacgcgagcatccacgacaccgtggagaacctcatcatcctggccaacaactccctgagcagcaacggcaacgtgacggagtccggctgcaaggagtgcgaggagctggaggaaaagaatatcaaggagttcctgcagagcttcgtgcacattgtccagatgttcatcaacacgtcc

SEQ ID NO: 945 - DNA, 447 bp, synthetic construct
  misc_feature 1..447: note = IL15opt-tPa6-CO46
  source 1..447: mol_type = other DNA
atggacgccatgaagagggggctctgctgcgtcctcctcctctgcggcgccgtcttcgtctcaccgtcccaggagatccacgccaggttcaggaggggcgcccggaactgggttaacgtcatctccgacctcaagaagatagaggacctcatacagtcgatgcacatcgacgccaccctttacaccgagagcgacgtccaccccagctgcaaggtcacggccatgaagtgtttcctcttggagctccaagtcatcagcctcgagagcggcgacgcctcgatccacgacacggtcgagaatctgatcatcctggccaacaacagcctgagcagcaatggaaacgtcacggagtcgggctgcaaggagtgcgaggagctggaggagaagaacatcaaggagttcctgcagagcttcgtacacatagtccagatgttcatcaacaccagc

SEQ ID NO: 946 - DNA, 447 bp, synthetic construct
  misc_feature 1..447: note = IL15opt-tPa6-CO47
  source 1..447: mol_type = other DNA
atggacgccatgaagaggggactctgctgcgtcctcctcctctgcggggccgtcttcgtcagccccagccaggagattcacgcccggttcaggaggggagccaggaattgggtcaacgtcatcagcgacttgaagaagatcgaggacctcatccagtccatgcacatcgacgccaccctctacacggagtccgacgtacatcccagctgcaaggtcaccgccatgaagtgcttcctcctcgagctccaggtcatcagccttgagagcggagacgcctccatccacgacaccgttgagaacctgatcatcctggccaacaacagcctgagcagcaacggcaacgtgacggagagcgggtgcaaggagtgcgaggagctggaagagaagaacatcaaggagtttctgcaaagcttcgtccatatagtgcagatgttcatcaatacgagc

SEQ ID NO: 947 - DNA, 447 bp, synthetic construct
  misc_feature 1..447: note = IL15opt-tPa6-CO48
  source 1..447: mol_type = other DNA
atggacgccatgaagcgcgggctctgctgcgtactcctcctctgcggggccgtcttcgtgagccccagccaggagatccacgcccgcttcaggcggggggcccgcaactgggtaaacgtcatcagcgacctcaagaagatcgaggacctcatccagagcatgcacatcgacgccaccctttacaccgagtccgacgttcacccgtcctgcaaggtcaccgccatgaagtgtttcctactcgaactccaagtcatatccttggagtccggagacgcctccatccacgacaccgtcgagaacctgatcatcctggccaacaactcgctgtccagcaacggcaacgtgacggagagcggatgcaaggagtgtgaggagctggaggaaaagaacatcaaggagttcctgcagagctttgtgcacatcgtgcagatgtttatcaacacctcc

SEQ ID NO: 948 - DNA, 447 bp, synthetic construct
  misc_feature 1..447: note = IL15opt-tPa6-CO49
  source 1..447: mol_type = other DNA
atggacgccatgaagcggggactctgctgcgtcctactcctctgcggggccgtcttcgtaagccccagccaggagatccacgcccgctttaggaggggcgccaggaactgggtcaacgtcataagcgacctcaaaaagatcgaggacctcatccagtcgatgcacatcgacgccaccctctataccgagtccgacgtgcacccgtcctgtaaggttaccgcaatgaagtgcttcctcttggaactccaggtcatcagcctcgagagcggcgacgccagcatccacgacaccgtcgagaacctgatcatcctggccaacaactccctgagcagcaacggcaacgtgaccgaaagcgggtgcaaggagtgcgaggagctggaggagaagaatatcaaggaatttctgcagtcgtttgtgcatatagtgcagatgttcatcaacacctct

SEQ ID NO: 949 - DNA, 447 bp, synthetic construct
  misc_feature 1..447: note = IL15opt-tPa6-CO50
  source 1..447: mol_type = other DNA
atggacgcgatgaagcgcgggctatgctgcgtcctattgctctgcggcgccgtcttcgtcagcccgagccaagagatacacgcccgctttaggaggggggccaggaactgggtcaacgtaatatccgacttaaagaagatcgaggatctcatccagagcatgcacatcgacgccaccctctacacggagagcgacgtccaccccagctgcaaggtcaccgccatgaagtgtttccttcttgagctccaggtcatcagcctagagtccggggacgccagcatccacgacacggttgagaacctgataatcctggccaacaacagcctgagcagcaacggcaatgtgaccgagagcgggtgcaaggagtgcgaggagctggaggagaagaacatcaaggagttcctccagagcttcgtccacatcgtgcagatgttcatcaacaccagc

SEQ ID NO: 950 - DNA, 1389 bp, synthetic construct
  misc_feature 1..1389: note = IL15_Fc_RLI-CO01
  source 1..1389: mol_type = other DNA
atggaaaccgacaccctcctcctctgggtcctcctactctgggttcccggaagcaccggcgaaccgaaaagctgcgacaagacccacacctgccccccgtgccccgcccccgagctcctcgggggccccagcgtcttcctcttccccccgaagcccaaagataccttaatgatcagccggaccccggaggtcacgtgcgtcgtcgtcgccgtcagccacgaggacccggaggttaagttcaactggtacgtcgacggcgtcgaggtccacaacgcgaaaaccaagccccgggaagaacagtataatagcacttaccgggtggtgtccgtgctgaccgttcttcaccaggactggctgaacggcaaggagtacaagtgcaaggtgtccaataaggccctgcccgcgcccatcgagaagaccatcagcaaggccaagggccagcccagggaaccccaggtatacaccctgccacccagccgggacgagctcaccaagaaccaggtgagcctgacctgcctggtgaaggggttctatcccagcgacatcgctgtcgaatgggagagcaacggccagcccgagaacaactataagaccacaccccccgtgctggacagcgacggcagcttcttcctgtacagcaagctgaccgtcgacaaaagccggtggcagcaaggcaacgtgtttagctgctccgtcatgcacgaggccctgcacaaccactacacccagaagagtctgagcctgtcccccggcaagatcacctgcccgcccccaatgagcgtggagcacgccgacatctgggtgaagtcgtactccctgtacagcagggagaggtacatctgcaacagtggattcaagcggaaggccgggaccagcagcctgaccgagtgcgtcctgaataaggccaccaacgtggcccactggaccaccccctcgctgaaatgtataagggatcccgccctggtgcaccagaggcccgccccaccgagcggtggctccggcggaggcggcagcgggggcggaagcggcggaggcgggagcctgcagaactgggtgaacgtcatctccgacctgaaaaagatcgaggaccttatccagagcatgcacatcgacgcgaccctctacaccgagagcgatgtacacccctcctgtaaggtgaccgccatgaagtgcttcctgctggagctgcaggtgatcagcctggagtccggcgacgcctccatccacgacaccgtggagaacctaatcatcctcgcgaacaacagcctgagctcgaacgggaacgtgacggagagcggctgcaaagagtgtgaggagctggaggagaagaacatcaaggagttcctgcagtccttcgtccacatcgtccagatgttcatcaatacctcc

SEQ ID NO: 951 - DNA, 1389 bp, synthetic construct
  misc_feature 1..1389: note = IL15_Fc_RLI-CO02
  source 1..1389: mol_type = other DNA
atggagacggacaccttactcctctgggtcctcctcctttgggtcccgggctccaccggggagcccaaaagctgcgacaagacgcacacctgcccgccctgtcccgcccccgaactcttgggcggccccagcgtcttcttgtttccccccaagcccaaagacacgctcatgatctctcggacccccgaggttacctgtgtagtcgtcgccgtcagccacgaggaccccgaggtcaagttcaactggtacgtggacggggtcgaggtacacaacgccaagaccaagccacgggaagaacagtacaacagcacctatcgggtggtgagcgtcctgaccgtgctccaccaagactggctgaacgggaaggagtacaagtgcaaggtgtccaacaaggccctgccggccccgatcgaaaagaccatttcgaaggccaaaggccagcccagggaaccccaggtgtacaccctcccacccagccgcgacgagctcacgaagaaccaagtgagcctcacctgcctggtgaagggcttctacccgagcgacatcgctgtggagtgggagagcaacggccagccagagaacaactataagaccacccctccggtgctggacagcgacggcagcttctttctctatagcaagctgaccgtggacaaatcccggtggcagcagggcaacgtgttctcctgcagcgtgatgcacgaggccctgcataatcattacacccagaaaagcctgagcctgagccccggcaagatcacctgcccgccccccatgagcgtggaacacgccgacatctgggtgaagtcctactccctgtatagcagggagaggtacatctgcaacagcggcttcaagaggaaggccggcaccagctccctgaccgagtgtgtgctcaacaaggccacaaatgtggcccattggaccacaccgtccctgaagtgcataagagatccagccctcgtgcaccagaggcctgccccgccctccgggggaagcgggggtgggggtagcggcggcgggagcgggggcggaggctccctccaaaactgggttaacgtgattagcgacctgaagaagatcgaggacctgatccagagcatgcacatcgacgccaccctctacaccgagtccgacgtgcaccccagctgcaaggtgaccgccatgaagtgtttcctcctggagctgcaggtaatctccctggagagcggggacgccagcatccatgatacggtggaaaacctgatcatcctggcgaacaactccctgagcagcaatggcaacgtcaccgagagcggatgcaaggagtgcgaggagctggaggaaaagaatatcaaggagttcctgcagtccttcgtccacatcgtgcagatgttcatcaacacctcg

SEQ ID NO: 952 - DNA, 1389 bp, synthetic construct
  misc_feature 1..1389: note = IL15_Fc_RLI-CO03
  source 1..1389: mol_type = other DNA
atggagacagacaccctcctcctctgggtcctcctcctctgggtccccgggagcaccggggaacccaagagctgcgacaaaacccacacctgccccccgtgccccgccccggaactcctcggcgggcccagcgtctttctcttccctcccaagcccaaagacacgctcatgatctccaggacccccgaggtaacctgcgtagtcgtcgccgttagtcacgaggacccggaggtcaagttcaactggtacgtcgacggcgtcgaagtccacaacgcgaagaccaagccccgggaggaacagtacaacagcacctacagggtggtgagcgtgctcaccgtcctgcatcaggactggctcaacggcaaggagtacaagtgtaaggtcagcaacaaggcactgcccgcccccatcgagaaaaccatcagcaaggccaagggccagccccgcgagccccaggtgtacaccctgcccccgagccgggacgagctcaccaagaaccaggtgagcctgacctgtctggtgaaaggcttctacccctcagacatagccgtggagtgggagagcaatgggcagccggagaacaactataagaccacccctcccgtgctagactcggacgggagtttctttctgtactccaagctgaccgtagacaagagcaggtggcagcaggggaacgtgttcagctgctccgtgatgcacgaggccctgcacaatcactacactcagaaaagcctgtccctgagccccggcaaaatcacctgccccccgcccatgagcgtcgagcacgccgacatctgggtgaaaagctactcgctgtacagccgggagcggtacatctgcaactcgggcttcaaacggaaggccggcaccagctctctgaccgagtgtgttctcaataaggccaccaacgtggcacactggaccaccccctccctaaagtgcattagggaccccgccctggtgcatcagaggcccgcccctccaagcggggggagcggcggtggcggctcggggggaggcagcgggggcgggggttccctgcagaactgggtgaacgtgatctccgacctgaagaagatcgaagatctgatccagtcgatgcacatcgacgccacactgtataccgagagcgacgtccaccccagttgcaaggtgaccgcgatgaagtgtttcctgctggagctccaggtgatcagcctggagagcggggacgccagcatccacgacacggtggagaacctgatcatcctggccaacaatagcctcagcagcaatggcaacgtgaccgaaagcgggtgcaaggagtgcgaggagctggaggagaagaacatcaaggaattcctgcaaagcttcgtccacatcgtccagatgtttatcaacaccagt

SEQ ID NO: 953 - DNA, 1389 bp, synthetic construct
  misc_feature 1..1389: note = IL15_Fc_RLI-CO04
  source 1..1389: mol_type = other DNA
atggagactgatacgctactcctctgggtcctcctcctctgggtccccgggagcaccggggagccgaagtcctgcgacaagacccacacgtgcccaccctgccccgcccccgaactcctcgggggcccctccgtcttcctctttccccctaagcccaaggacaccttgatgatcagcagaacgcccgaggtcacctgtgtagtcgtcgccgtcagccacgaggacccggaggtcaaattcaactggtacgtggacggcgtcgaggttcacaacgccaagaccaagccccgggaggagcagtacaatagcacctacagggtggtgagcgtgctgacggtgctacaccaggactggctgaacgggaaagagtataagtgcaaggtgagcaacaaggccctgcccgccccgatcgagaagaccatcagcaaggccaagggccagcccagggagccccaggtctacaccctgccccccagcagggatgagctgacgaagaaccaggtcagcctgacttgcctggtcaagggcttctaccccagcgatatcgccgtggagtgggaaagcaacggccagcccgagaataactacaagaccaccccgcccgtgctggattccgacggcagctttttcctgtactccaagctgaccgtcgacaaaagcaggtggcagcagggcaacgtgttcagctgtagcgttatgcacgaggccctgcacaaccactacacccagaaaagcctcagcctgtcccccggcaagatcacctgccccccgccgatgagcgtggagcacgccgacatctgggtcaagagctacagcctgtacagcagggagaggtacatctgcaacagcggcttcaagaggaaggcgggcaccagcagcctgacggagtgcgtgcttaacaaggccacgaacgtcgcccattggaccaccccgagccttaagtgtatcagggatccggccctggtccaccagaggcccgccccgccctccggaggcagcggaggcggcggaagcggtggcggaagcgggggcggtggcagcctacagaactgggtgaacgtgatctcagatctgaaaaagatcgaggacctgatccagtccatgcacatcgatgcaaccctgtataccgagagcgacgtgcaccccagctgcaaggtgaccgccatgaaatgtttcctgctggagctgcaggtgatcagcctggaaagcggggacgcctccatccacgacaccgtggagaacctgatcatcctcgccaacaacagcctgagcagcaacggcaacgtgaccgagagcgggtgcaaagagtgtgaggagctggaggagaagaacataaaggagttcctgcagagcttcgtgcacatcgtccagatgttcatcaacacctcc

SEQ ID NO: 954 - DNA, 1389 bp, synthetic construct
  misc_feature 1..1389: note = IL15_Fc_RLI-CO05
  source 1..1389: mol_type = other DNA
atggagacggacaccctactcctatgggtccttctcctctgggtcccgggcagcaccggcgagcccaagagctgcgacaagacgcacacctgcccgccgtgccccgcccccgagctcctcgggggccccagcgtattcctcttccccccaaagcccaaggacaccctcatgatcagccggacccccgaggtcacctgcgtcgtcgtagccgtctcccacgaggaccccgaggtcaagtttaactggtacgttgacggcgtcgaggtccacaacgcgaagaccaagccccgggaggagcaatacaactccacataccgcgtggtgagcgtgttgaccgtgctccaccaggactggctcaatggcaaagagtacaaatgcaaggtgagcaacaaggccctgccggccccaatcgagaagaccatcagcaaggcgaaagggcaacccagggagccccaggtgtatacgctcccacccagcagggacgagctcaccaagaaccaggtgagcctgacgtgcctcgtgaagggcttttacccgagcgacatcgccgtcgagtgggagagcaacgggcaacccgagaacaactacaaaaccacccctcccgtgctggacagcgacggcagcttctttctgtacagcaagctgaccgtggacaagagccggtggcagcaggggaacgtttttagctgctccgtcatgcacgaggccctgcacaaccattacacccagaaaagcctgagccttagccccgggaagatcacgtgcccgcccccaatgagcgtggagcacgccgacatatgggtcaagtcgtacagcctgtacagccgggagaggtacatatgcaactccggcttcaagcggaaagcgggcacctccagcctgaccgagtgcgtgctgaacaaggccactaatgtggcccattggaccaccccctccctgaaatgtatcagagatccggccctggtccaccagaggcccgccccacccagcggcggcagcggtggcggcggcagtggaggcggctcagggggcgggggcagcctgcagaactgggtgaacgtgatctccgacctgaagaagatcgaggacctgatccagtccatgcacatcgatgccacactgtacacggaaagcgatgtgcaccccagctgcaaggtgaccgccatgaagtgcttcctgctggagctccaggtcatctccctggaatcaggggacgccagcatccacgacaccgtggaaaacctgatcatcctggccaacaatagcctgagcagcaacgggaacgtaaccgagagcggctgcaaggagtgcgaggagctggaggagaagaacataaaggagttcctccagagcttcgtgcacatcgtgcagatgtttatcaacaccagc

SEQ ID NO: 955 - DNA, 1389 bp, synthetic construct
  misc_feature 1..1389: note = IL15_Fc_RLI-CO06
  source 1..1389: mol_type = other DNA
atggagacagataccctgctcctctgggttctcctcttgtgggtccccggcagcaccggagagcccaagagctgtgacaagacacacacctgcccgccctgccccgcccccgagctcttgggcgggccctccgtgttcttgttcccgcccaagcctaaggacaccctcatgatatcgaggaccccggaggttacctgcgtcgtcgtagcggtgtcccacgaagaccccgaggtcaaatttaactggtacgtggacggcgtcgaggtacataacgcgaagaccaagccccgggaggagcaatacaactccacctacagggtcgtgagtgtcctgaccgtactgcaccaggactggctcaacgggaaggagtacaagtgcaaggtgagcaataaggccctgcccgccccgatcgagaaaaccatcagcaaggccaagggccagccgagggagccccaggtgtacaccctcccgccctcacgcgacgagctgaccaagaaccaggtgtcgctgacctgcctggtcaagggtttctacccgagcgacatcgccgtggagtgggagagcaacggccagccggaaaacaactacaagacgacaccacccgtcctggacagcgacgggagcttctttctgtattctaagctcaccgtggacaagagccggtggcagcagggcaacgtgttctcctgctccgtcatgcacgaagccctgcacaaccactacacccagaaaagcctgagcctctcccccggcaagatcacgtgccccccgcccatgagcgtggagcacgcggacatttgggtcaagagctacagcctgtacagccgggaacgctacatctgtaactcgggcttcaagaggaaggccggcaccagctcactgaccgagtgcgtgctgaacaaggccaccaacgtggcccactggaccaccccctccctcaagtgtatccgcgaccccgccctggtgcaccaaaggcccgccccacctagtggcgggagcggcggcggtggatcaggcggcggctccgggggagggggtagcctgcaaaactgggtgaatgtaatcagcgacctcaagaagatcgaagacctgatccagagcatgcacatcgacgcgaccctgtacacggaaagcgacgtgcaccccagctgcaaggtgaccgccatgaagtgcttcctgctggagctgcaggtgatcagcctggagagcggggatgccagcatccacgacaccgtggaaaacctcatcatcctggccaataactccctgagcagcaacgggaacgtgaccgagtccggctgcaaggagtgcgaggaactcgaagagaaaaacatcaaggaattcctgcagtcgttcgtgcatatcgtgcagatgttcatcaacaccagc

SEQ ID NO: 956 - DNA, 1389 bp, synthetic construct
  misc_feature 1..1389: note = IL15_Fc_RLI-CO07
  source 1..1389: mol_type = other DNA
atggagacggacacgctcctcctctgggtcttgctcctctgggtccccggcagcacgggcgagcccaagtcctgcgacaagacccacacctgcccgccctgcccggcccccgagctactcgggggccccagcgtattcctcttcccacccaagcctaaggacacgctcatgatctcgcggaccccggaggtcacgtgcgtcgtcgtcgccgtctcccacgaggaccccgaggtcaaatttaactggtacgtcgacggcgtcgaggtccacaacgccaagaccaagccccgggaagaacagtacaattcgacgtaccgcgtggtgtccgtgctgaccgtcctgcaccaggactggctcaatgggaaggagtacaagtgcaaagtcagcaacaaggccctgcctgcccccatcgaaaagaccatcagcaaggcaaagggccaaccaagggagccccaggtgtacacactgccccccagcagggacgagctgacaaagaatcaggtgagcctgacctgcctggtcaaggggttttaccccagcgacatagccgtggagtgggagtccaacgggcagcccgagaataattacaagaccaccccgcccgtgctggacagcgacgggagcttcttcctgtactccaagctgaccgtggacaaaagcaggtggcagcagggcaacgtctttagctgctccgtgatgcacgaggccctgcacaaccattacacccagaagtccctcagcctgagccccggcaagatcacctgcccgccccccatgtccgtggagcacgccgacatatgggtgaaatcgtacagcctgtactcacgggagcggtacatctgcaacagcggattcaagagaaaggccggcaccagcagcctgaccgagtgcgtgctgaacaaggccaccaacgtggcccactggaccacgccctccctcaagtgtatacgggatcccgcactcgtgcatcaaaggcccgccccaccctccggaggctccgggggaggaggaagcgggggcgggtccggcggcgggggaagcctgcagaactgggtgaacgtgatcagcgacctcaagaagatcgaggacctgatacagtccatgcacatcgacgccaccctctacaccgagagcgacgtccacccctcgtgcaaggtgaccgccatgaagtgcttcctgctggagctccaggtgataagcctggagtccggcgatgcatcgatccacgacaccgtggagaacctaatcatcctcgcaaacaacagcctctcctcgaacggcaacgttaccgagagcggttgcaaggaatgcgaggagctggaggaaaagaatatcaaggagttcctgcagagcttcgtccacatcgtccagatgttcatcaacacctcc

SEQ ID NO: 957 - DNA, 1389 bp, synthetic construct
  misc_feature 1..1389: note = IL15_Fc_RLI-CO08
  source 1..1389: mol_type = other DNA
atggagacggacaccctcctcctctgggtcctcctcctctgggtccccggtagcaccggggagcccaagtcctgcgacaagacccacacgtgtcccccctgccccgccccggagttgctcggcgggccgagcgtcttcctctttccccccaagcccaaagacaccttaatgatcagccggacccccgaggttacgtgtgtcgtcgtcgcggtgtcccacgaagaccccgaggtcaaatttaactggtacgtggacggggtcgaggttcacaacgccaagaccaagccccgggaggagcagtacaactccacctaccgcgtggtgtccgtgctgaccgtgctgcaccaggactggctgaatgggaaggagtataagtgcaaggtgtccaacaaggccctgcccgccccgatcgaaaagacgatctccaaggccaagggccagcccagggagcctcaggtgtacaccctgcccccctcccgggatgagctgaccaaaaatcaagtgtccctgacctgcctggtgaagggattctatcccagcgacatcgcggtcgagtgggagagcaacgggcagcccgagaacaactacaagacgacccctcccgtgctggatagcgacgggagcttcttcctgtacagcaagctgaccgtggacaagagcaggtggcagcagggcaacgtttttagctgcagcgtgatgcacgaggccctgcacaaccactacacacagaaaagcctcagcctgtcccccgggaaaatcacctgcccaccccccatgtccgtggagcacgccgacatctgggtgaaaagctacagcctctactcccgggagcgctacatctgcaattccggcttcaagaggaaggccggcacctccagcctcaccgaatgcgtgctgaacaaggccaccaacgtggcgcattggaccacacccagcctgaagtgtatccgagatccggccctggtacaccagcgtcccgcacccccgagcgggggctccggcggcggcgggagcgggggcggtagtgggggaggcggtagcctccagaattgggtgaacgtgatctccgatctgaagaagatcgaggacctgatccagtccatgcatatagatgcgaccctgtacacggaatccgacgtgcaccccagctgtaaggtgaccgccatgaagtgctttctcctggaactccaggtgatcagcctggagagcggcgacgcctcaatccacgacacggtggagaacctcatcatcctggcgaacaattcgctcagctccaacggcaacgtgaccgagagcgggtgcaaggaatgcgaggagctggaggagaagaacatcaaagagttcctgcagtcctttgtgcatatcgtgcagatgttcatcaacacctcc

SEQ ID NO: 958 - DNA, 1389 bp, synthetic construct
  misc_feature 1..1389: note = IL15_Fc_RLI-CO09
  source 1..1389: mol_type = other DNA
atggagacagacacgctcctcctgtgggtactcctcctctgggtccccggaagcacgggggaaccaaagagctgcgacaagacccacacctgccccccgtgccccgcccccgagctactcggcgggccgtccgtcttcctcttcccgcccaagcccaaagacacgctcatgatcagcaggaccccggaggtaacctgcgtagtcgtcgccgttagccacgaagacccggaggtcaagttcaactggtacgtcgacggggtcgaggtccacaacgccaagaccaagccccgcgaggagcagtacaacagcacgtacagggtcgtctccgtgctgaccgtgctgcatcaggactggctcaacggcaaggagtataagtgcaaggtgagcaacaaggccctgcccgcccccatcgagaagaccatcagcaaggctaagggccagcccagggagccccaggtgtacaccctgccccccagcagggacgaactcaccaagaaccaggtgagcctgacctgcctggtaaagggcttctaccccagcgatatcgcggtggagtgggagagcaatggccagcccgaaaacaactacaagacgaccccgccggtcctggacagcgacggcagcttcttcctgtattccaagctcaccgtggacaaatccaggtggcagcagggcaatgtgttcagctgcagcgtgatgcacgaggccctgcacaaccactacacccagaagtccctgagcctgtcccccgggaagatcacctgcccgccccccatgagcgtggagcacgcggatatctgggtgaagtcctacagcctgtacagtcgagaacggtacatctgcaacagcggctttaagcggaaggccggcaccagcagcctcaccgagtgcgtgttgaacaaggccaccaacgtcgcccactggacaacccccagcctgaaatgtatccgagatcccgcgctagtccaccaacgacccgcccctccctccggcgggagcggcggcggtgggtcgggcggcggcagcgggggtggcggcagcctccagaactgggtgaacgtgatcagcgatctgaaaaagatcgaggacctgatccagtcgatgcacatcgacgcgaccctctacacagagtccgacgtccatcccagctgcaaggtgaccgccatgaaatgcttcctgctggagctccaggtgatcagcctggaaagcggggacgcctccatacacgacaccgtggagaacctgatcatcctggccaacaacagcctcagcagcaatgggaacgtgaccgaatctggctgcaaggagtgcgaggagctggaggagaagaacatcaaggagtttctccaatccttcgtgcacatcgtccagatgttcatcaacaccagc

SEQ ID NO: 959 - DNA, 1389 bp, synthetic construct
  misc_feature 1..1389: note = IL15_Fc_RLI-CO10
  source 1..1389: mol_type = other DNA
atggagactgacaccctcctcctatgggtcctactactctgggtcccgggcagcaccggcgagccaaagtcctgcgacaagacccatacctgcccgccctgccccgccccggagctcctcggcggcccgagcgtcttcctcttccctcccaagcccaaggacaccctcatgatcagccggacccccgaggtaacctgtgtcgtcgtcgccgtcagccacgaggacccagaggtaaaattcaattggtacgtcgacggcgtcgaggtccacaacgccaagaccaagccgcgcgaggagcagtacaacagcacgtacagggtggtcagcgtgctgaccgtgctgcatcaggactggctcaacggcaaggagtataagtgcaaggtaagcaacaaggccctgcccgcccccatcgagaagaccatctctaaggccaaaggacagccccgagagccccaggtgtataccctgccacccagccgggacgagctcaccaaaaaccaggtgagcctgacctgcctggtgaagggcttttacccgagcgacatcgccgtggagtgggagagcaacggccaaccggagaacaactacaagacgacaccccccgtgctggactccgacggcagcttctttctgtactcgaagctcaccgtggacaagagccgatggcagcaggggaatgtgttctcctgcagcgtcatgcatgaggcgctgcacaaccactacacccagaaaagcctgagcctttcacccggcaagatcacctgcccccctccgatgagcgtggaacacgcggacatctgggtgaaaagctactccctgtacagcagggagcggtacatctgcaacagcggcttcaagcggaaagccggcaccagctccctgaccgagtgcgtcctgaataaggccacgaacgtggcgcactggacaacccccagcctgaagtgcatcagggatcccgccctggtgcaccaaaggcccgccccgccgagcgggggctccggcgggggtggcagcggtggcggttcgggagggggaggaagcctgcaaaactgggtgaacgtgatctccgacctgaagaagatcgaggacctgatccagagcatgcacatcgacgcgaccctgtataccgagtccgacgtgcacccctcctgtaaggtcaccgcgatgaagtgcttcctcctggaactgcaggttatcagcctggagtccggagacgcctccattcacgacactgtggagaacctgatcatcctggcgaacaacagcctgagctccaacggaaatgtgaccgagagcgggtgcaaagagtgcgaggagctggaagagaagaacattaaggagttcctacagagcttcgtgcacatcgtgcagatgttcataaacaccagc

SEQ ID NO: 960 - DNA, 1389 bp, synthetic construct
  misc_feature 1..1389: note = IL15_Fc_RLI-CO11
  source 1..1389: mol_type = other DNA
atggagactgacacactcctcttgtgggtcctcctcctgtgggtacccgggagcaccggagagcccaagagctgcgacaagacgcatacctgtccgccctgccccgcccccgagcttctcgggggacccagcgtattcctcttccccccgaagccgaaagataccttaatgatctccaggacgcccgaggtaacctgcgtcgtcgtcgcggtcagccacgaggacccggaggtcaagttcaactggtacgttgacggggtcgaggtccacaacgccaagacgaagccccgggaggagcaatacaacagtacctacagggtggtgagcgtgctgacggtgctgcaccaagactggctgaacggcaaagagtataaatgcaaagtgagcaacaaagcgctgccggcccccatcgaaaagaccatctccaaggccaaaggccagccccgggagccgcaggtgtacaccctcccgcccagccgggacgagctgaccaagaatcaggtcagcctcacctgcctggtgaagggattctaccccagcgacatcgctgtggagtgggagtccaacggccagcccgagaataactacaagaccactccccccgtgctggacagcgacggctccttcttcctgtatagcaaactgacggtggacaaatcccggtggcagcaaggcaacgtgttcagctgcagcgtgatgcacgaagcgctgcacaaccattacacccagaagtccctgtcgctgagccccggcaagatcacctgcccgccccccatgagcgtggagcacgccgacatctgggtgaaaagctatagcctctacagccgggaacgctacatttgtaactccgggttcaagaggaaggccggaaccagctccctgaccgagtgcgtcctgaacaaagccaccaatgtggcccattggaccaccccctccctgaagtgtatcagggatcccgcgctggtgcaccaaaggcccgctcccccgagcggaggcagcgggggtgggggctcagggggagggagcggcggcggcggttccctgcagaactgggtcaatgtcatctccgatctcaaaaagatcgaggacctgatccagagcatgcacatcgacgccaccttgtatacagagtccgacgtgcatcccagctgcaaggtgaccgccatgaaatgcttcctgctggaactgcaggtgatcagcctggagagcggcgacgcatccatccacgacaccgtggagaacctgatcatcctggcgaataacagcctgagctccaatggcaacgtgaccgagagcgggtgcaaggagtgtgaggagctggaggagaagaatatcaaggagttcctgcagagcttcgtgcacatcgtccaaatgttcatcaacaccagc

SEQ ID NO: 961 - DNA, 1389 bp, synthetic construct
  misc_feature 1..1389: note = IL15_Fc_RLI-CO12
  source 1..1389: mol_type = other DNA
atggagacggacacccttctcctctgggtcctccttctctgggtccccggaagcaccggggagccgaaaagctgcgacaagacccacacctgcccgccctgccccgcgcccgagctcctcggcgggccatccgtcttcctattcccgcccaagcccaaggacactttgatgataagcaggaccccggaggtcacgtgcgtcgtagtagcggtcagccacgaagaccccgaggtcaagttcaactggtacgtcgacggcgtcgaagtccacaacgccaagaccaaaccacgcgaggagcaatacaactcgacctacagggtggtgagcgtgctgacggtcctgcatcaggactggctgaacggcaaggagtataaatgtaaggtgagcaacaaggccctgcccgcccccatcgagaagaccatcagcaaggccaagggccaaccgagggagccccaggtctacacgctgcccccctcgcgggacgagctgaccaagaaccaggtgagcctgacctgcctggtgaagggcttctacccctccgatatcgccgtggagtgggagagcaacgggcagccagagaacaactacaagaccacgcccccggtgctcgacagcgacggcagcttcttcctgtatagcaagctgaccgtggacaagagccgctggcagcagggcaacgtgtttagctgcagcgtgatgcacgaagccctgcataaccactacacccagaaaagcctgtcactgagcccgggaaagatcacctgccccccacccatgagcgtggagcacgccgacatctgggtgaagtcctactccctgtacagcagggagcggtacatctgcaacagcgggttcaagcgcaaggccggcaccagctcgctgaccgagtgcgtgctgaacaaggccacaaacgtcgcccactggacgaccccatcactgaagtgtatcagggatcccgccctggtgcaccagaggcccgccccgccttcaggcggcagcgggggaggaggatccggcggtgggagcggcggcgggggatcgctgcaaaactgggtgaacgtcatatcggacctgaagaagatcgaggacctcatccagagcatgcacatcgacgcaaccctgtacacagagagtgacgtccatccctcctgcaaggtcaccgccatgaagtgcttcctgctggagcttcaggtcatcagcctggaatccggggacgcctccatccatgataccgtggagaacctgatcatcctggccaacaactcgctcagcagcaacgggaatgtcaccgagagcgggtgcaaggagtgcgaggagctggaggagaaaaacatcaaggaattcctgcaaagcttcgtgcacatcgtgcagatgtttatcaacacctcg

SEQ ID NO: 962 - DNA, 1389 bp, synthetic construct
  misc_feature 1..1389: note = IL15_Fc_RLI-CO13
  source 1..1389: mol_type = other DNA
atggagacggacacccttctcctctgggtcctccttctgtgggtccccgggagcaccggggagccaaagagctgcgacaagacccacacctgcccgccctgcccggcccccgagttactcggcggccccagcgtcttcctcttccctcccaagcccaaggacaccctcatgatctcgaggacccccgaggtcacctgcgttgtcgtcgccgtcagccacgaggatccagaggttaagttcaactggtacgttgacggcgtcgaggtccacaacgccaagacgaagccccgcgaggagcaatataactccacctatcgggtggtgagcgtgctcaccgtgttgcaccaggactggctgaacgggaaggagtacaaatgtaaggtgtccaataaggccctgcccgccccgatagaaaagaccatctccaaggccaaggggcagcccagggagccccaggtatacaccctcccacctagccgcgacgagctgaccaagaaccaggtgagcctgacgtgcctggtgaagggcttttaccccagcgatattgcggtggagtgggaaagcaacggccagccggagaacaactacaagaccacacccccggtgctggactcggacggcagcttctttctgtattcgaagctcaccgtggacaagtccaggtggcagcagggcaatgtgttcagctgcagcgtgatgcatgaggccctgcacaaccactacacccagaaaagcctgagcctgagccccgggaagataacctgccctccccccatgtccgtggaacacgccgacatctgggtgaaaagctacagcctgtatagccgcgagcgttacatctgcaacagcgggttcaaaaggaaggcaggcacctccagcctgaccgaatgtgtcctgaacaaggccaccaacgtggcacactggaccacaccgagcctgaagtgcataagggacccagccctggtgcatcagaggccggccccacccagtgggggcagcggcggcggcggatcgggcggcggcagcggtggcggaggctccctccagaattgggtgaacgtgataagcgacctcaagaagatcgaggacctgatccagagcatgcacatcgatgccacgctctacacggaatccgacgtgcacccctcgtgcaaagtgaccgccatgaagtgcttcctactggagctccaggtgatctccctcgagtccggagatgcctccatccacgacaccgtggagaacctgatcatcctcgccaacaacagcctgtccagcaacggcaatgttaccgagagcgggtgcaaggagtgtgaggagctggaggagaagaacatcaaagagttcctccagagcttcgtgcacatcgtccaaatgttcatcaacacttcc

SEQ ID NO: 963 - DNA, 1389 bp, synthetic construct
  misc_feature 1..1389: note = IL15_Fc_RLI-CO14
  source 1..1389: mol_type = other DNA
atggagacagacacgctcctcttatgggtcctcctcctctgggtccccggcagcaccggggagcccaagagctgcgacaagacccacacctgcccgccctgccccgcccccgagctcctcggcggtcccagcgtcttcctcttcccgcccaagccgaaggataccttaatgatcagccggacccccgaggtcacctgtgtagtcgtcgccgtcagccacgaggaccccgaagtcaagttcaactggtacgtcgacggcgttgaggtacacaacgcgaagaccaagcccagggaggagcagtacaacagcacctaccgggtggtgagcgtgctgaccgtgctccaccaggactggctgaacggcaaggagtacaagtgcaaggtgtccaacaaggccctccccgccccgatcgagaagaccatcagcaaggccaagggccaacccagagagccccaggtatacaccctgccccccagccgggacgagctgaccaagaaccaggtcagcctgacctgcctggtgaagggcttctaccccagcgacatcgccgtggagtgggagagcaacggccagcccgaaaacaattacaagaccaccccgcccgtgctggactccgacggcagcttcttcctctacagcaagctgaccgtggacaaaagccgctggcagcaggggaatgtgttcagctgctcggtcatgcacgaagccctccacaaccactacacccagaaaagcctgagcctgtcgcctggcaagatcacctgcccgccccccatgtcggtcgagcacgccgacatctgggtcaagagctattccctgtatagcagggagcggtacatttgcaactcaggtttcaagaggaaggccggcaccagcagcctcaccgagtgtgtgctgaacaaggccaccaacgtggctcactggaccacccccagcctgaaatgcatccgtgatcccgcactggtacaccagaggcccgccccgcccagcggcggctcgggcggaggagggtccgggggcggcagcggtggcggtggctcgctgcagaactgggtgaatgtgatcagcgacctgaaaaagatcgaggatcttatccaaagcatgcacatagatgccaccctgtacaccgaaagcgacgtgcaccccagctgcaaagtgaccgccatgaagtgtttcctgctcgagctgcaggtcatcagcctggagagcggcgacgccagcatccacgataccgtggagaacctgatcatcctggcgaacaacagcctcagctccaacggaaatgtgaccgagagcggctgcaaggagtgcgaggagctggaggaaaagaacatcaaagagttcctgcagagcttcgtgcatatagtgcagatgttcattaacaccagc

SEQ ID NO: 964 - DNA, 1389 bp, synthetic construct
  misc_feature 1..1389: note = IL15_Fc_RLI-CO15
  source 1..1389: mol_type = other DNA
atggagacggacaccctcctcttatgggtcctcctcctctgggtccccgggagcaccggcgagcccaagtcctgcgacaagacccacacctgcccgccctgccccgcccccgagctcttaggcggcccctcggtattcctcttcccgcccaagccgaaggacacacttatgatatcgaggaccccggaggtcacctgcgtagtcgtcgccgtatcccacgaggacccggaggtcaagttcaactggtacgtcgacggcgtcgaggtccacaacgcgaagacgaaaccgagggaggagcagtataacagcacttacagggtggtgtccgtgctgaccgtgctgcaccaggactggctgaacgggaaagagtacaagtgcaaggtcagcaacaaggccctgcccgcccccattgagaagaccatcagcaaggccaagggccagcccagggagccccaggtgtacaccctgcccccctccagggacgagctgaccaagaatcaggtgtccctgacctgcctcgtgaaaggcttctaccccagcgacatcgcggtggagtgggagagcaacggccagccggaaaataactacaagaccaccccgcccgtgctggacagcgacggaagcttcttcctctacagcaagctgaccgtggacaagagcaggtggcagcagggcaacgtcttcagctgctccgtgatgcacgaggccctgcacaaccactacacccagaaaagcctcagcctgagccccgggaagatcacctgtcccccacccatgtccgtggagcacgccgacatttgggtgaaaagctacagcctgtactcccgggagcgctacatttgcaacagcggcttcaaaaggaaggccggcacctcctccctgacggagtgcgtcctgaacaaggccacgaacgtggcccactggacaactcctagcctgaagtgcatcagggatcccgcactggtgcaccagaggcccgccccaccctccgggggctccggaggaggcggaagcgggggaggctcgggcggcggaggcagcctgcagaactgggtcaacgtcatcagcgacctcaagaagatcgaggacctgatccagtccatgcacatcgacgccaccctatacaccgagagtgatgtgcaccccagctgcaaggtcacagcgatgaagtgcttcctgctcgagctccaggtgatcagcctggaaagcggcgacgcctccatccacgacaccgtggagaatctgatcatcctggccaacaacagcctgagcagcaacggcaacgtgaccgagtcgggttgcaaggagtgcgaggaactggaggagaagaatataaaggagttcctgcagagcttcgtccatatcgtgcagatgttcatcaacacctcc

SEQ ID NO: 965 - DNA, 1389 bp, synthetic construct
  misc_feature 1..1389: note = IL15_Fc_RLI-CO16
  source 1..1389: mol_type = other DNA
atggagactgacacgctcctcctctgggtcctcctcctctgggtcccgggcagcaccggcgagccaaagtcctgcgacaagacccacacctgccccccgtgtccggcgccagagctccttggggggccctccgtcttccttttcccgcccaagcccaaggacaccctcatgatcagccgcacaccggaggtcacgtgtgtagtcgtcgccgtctcccacgaggacccggaggttaaatttaactggtacgtggacggcgttgaggtccacaacgccaagaccaaacccagggaggagcagtacaacagtacctaccgggtggtcagcgtgctgaccgtgctgcatcaggactggctgaacggtaaggagtacaagtgtaaagtgagcaacaaggcccttccagcccccatcgaaaagaccatcagcaaggccaagggtcagccgcgggagccccaggtgtacaccctgcccccctccagggatgagctgaccaagaaccaagtgtccctgacctgtctggtgaagggcttctacccgtccgacatcgcggtagagtgggagtccaacgggcagccggagaacaactacaaaaccaccccacccgtgctggacagcgacgggagcttcttcctgtactcaaagctgacggtcgacaagtccaggtggcagcagggcaatgtgttcagctgcagcgtaatgcacgaggccctgcacaaccattacactcaaaagagcctcagcctgagcccaggcaagatcacatgtcccccgcccatgagcgtggagcacgccgacatctgggtgaagtcctatagcctttactccagggaaaggtacatctgtaacagcggcttcaagcggaaggcggggaccagcagcctgaccgaatgcgtcctgaacaaggccaccaatgtcgcccactggactacccccagcctgaagtgtatccgggatcccgccctggtgcatcagcgacccgccccgccctccggcggttccgggggtggcggaagcggcggaggctccggcggtggcggatccctgcagaactgggtgaacgtgatctccgatctgaagaagatcgaggacctgatccaaagcatgcacatcgacgccacgctctacacagagagcgacgtgcaccccagctgcaaggtcaccgcgatgaaatgcttcctcctggagctgcaggtgatcagcctggaatcgggggacgccagcatccacgacaccgtggagaacctcatcatcctcgccaacaatagcctgagcagcaacggcaacgtgaccgaatccggctgcaaggaatgtgaggagctggaggagaagaacatcaaagagttcctgcagagcttcgtccatatcgtgcagatgttcatcaacaccagc

SEQ ID NO: 966 - DNA, 1389 bp, synthetic construct
  misc_feature 1..1389: note = IL15_Fc_RLI-CO17
  source 1..1389: mol_type = other DNA
atggagacagacaccttgctcctctgggtcctcctcctctgggttccgggcagcacgggcgagcccaagagctgcgacaaaacccatacgtgccctccctgccccgcccccgagttgctcggggggccctccgtattccttttcccacccaagccaaaggacaccctaatgatcagccggacccccgaagtcacctgcgtcgttgttgccgtctcccacgaagaccccgaggtcaagttcaactggtacgtcgacggggtcgaggtacacaacgccaaaacgaagccgagggaggagcagtacaactccacctacagagtggtgtccgtgctgacggtgctgcaccaagattggctcaacgggaaggagtacaagtgcaaggtgagcaacaaagctctgcccgcccccatcgaaaagacgattagcaaagccaaggggcagcccagggagccccaggtctacacgctgcctcccagccgtgacgaactgaccaagaaccaggtaagcctgacctgtctcgtgaagggcttctaccccagcgacatcgccgtggagtgggaaagcaacggacaacccgaaaacaactacaagaccaccccacccgtgctcgactcggacggcagcttcttcctgtatagcaagctgaccgtcgacaagagcaggtggcagcagggcaatgtgttcagctgctcggtgatgcacgaagccctccacaaccactacacccagaaaagcctgtccctcagcccgggcaagatcacctgcccgccgcccatgtccgtggagcacgcggacatctgggtgaaaagctactccctgtactccagggagaggtatatctgcaacagcggcttcaaacggaaggccgggaccagcagcctgacggagtgcgtcctgaacaaggccaccaacgtggcccattggaccacgccctcgctcaagtgtatcagggaccccgccctggtgcaccagaggcccgccccaccctccggaggttccggcggagggggcagtggcgggggctccggcggaggtgggagcctgcagaactgggtcaacgtgatcagcgacctgaagaagatcgaagacctgatacagagcatgcacatcgacgccaccctgtacaccgagagcgacgtccaccccagctgcaaggtgaccgccatgaagtgctttctgctggagctgcaggtgatcagcctcgagtccggggatgcctccatccatgacaccgtggagaacctgataatcctggccaataatagtctgagcagcaacggcaacgtgaccgagagcggctgcaaggagtgcgaggagctggaagagaagaacatcaaggagttcctgcagtccttcgtgcatatagtgcagatgtttatcaacaccagc

SEQ ID NO: 967 - DNA, 1389 bp, synthetic construct
  misc_feature 1..1389: note = IL15_Fc_RLI-CO18
  source 1..1389: mol_type = other DNA
atggaaacggataccctcctcctctgggtccttctgctctgggtccccggcagcaccggcgagcccaagtcctgcgacaaaacccatacctgccccccgtgccccgcccccgagctcctcggcggccccagcgtcttcctcttcccacccaagccgaaggatacgctcatgataagccgcacccccgaggtcacctgcgtcgttgtcgccgtaagccacgaggaccccgaggtcaagttcaactggtacgtagacggcgtcgaggtccacaacgccaagaccaaacccagagaggagcagtacaatagcacctaccgggtcgtgagcgtcctgaccgtgctccaccaggactggctcaacgggaaagagtataagtgcaaggttagcaacaaggccctgcccgcacccatcgagaagaccattagcaaggccaaggggcagcccagggagccgcaggtgtataccctcccgccctcccgcgatgagctcaccaagaaccaggtgagcctgacctgcctggtgaagggcttctaccccagcgacatcgccgtcgagtgggagagcaacgggcagcccgagaacaactacaagaccaccccacccgtgctggatagcgacgggagcttttttctctacagcaagctgaccgtggacaagagcaggtggcagcaggggaacgtgtttagctgcagcgtcatgcacgaagccctgcacaaccattatacgcagaagtccctgagcctgtcccccggcaagatcacctgcccgccccccatgtcggtcgagcacgccgacatctgggtgaaaagctatagcctgtacagccgcgagaggtacatctgcaattccggcttcaaacggaaggccgggacctccagcctgaccgagtgcgtgcttaacaaggccactaacgtggcccattggaccacccccagcctcaagtgcatcagggaccccgccctggtgcaccagaggcccgcccctccgagcggaggctccggagggggcggtagcggcggtgggagcggtgggggaggtagcctgcagaattgggtgaacgtgatcagcgacctcaaaaagatagaggacctgatccagagcatgcacatcgatgccaccctgtacacggagtccgacgtgcaccccagctgcaaggtgacggccatgaagtgcttcctgctggaactgcaggtcatcagcctggagagcggcgacgccagcatccacgataccgtggaaaatctgatcatcctggcgaacaacagtctgtcaagcaacggcaacgtgaccgagagcgggtgtaaggaatgcgaggagctcgaagagaagaatatcaaggagttcctgcagagctttgtgcatatcgtgcagatgttcataaacaccagc

SEQ ID NO: 968 - DNA, 1389 bp, synthetic construct
  misc_feature 1..1389: note = IL15_Fc_RLI-CO19
  source 1..1389: mol_type = other DNA
atggaaaccgacacgctcctcctctgggtcctcttgctctgggtcccgggctccaccggggagcccaagagctgcgacaagacccacacgtgcccgccctgtccggctccagagctcctcggcggccccagcgtcttcctcttcccgcccaagcccaaggacaccctcatgatctcccggacccccgaggtcacctgcgtcgtcgtagccgtcagccacgaggatcccgaggtcaagttcaactggtacgtcgacggcgtcgaggtacacaacgccaagaccaagccccgcgaggagcagtacaatagtacctacagggtagtgagcgtcctgaccgtcctccatcaagactggctgaacggcaaggagtataaatgcaaggtcagcaataaggccctgcccgcccccatcgagaagaccatctccaaggccaaggggcagccacgagagccccaggtgtacaccctgcctccctctagggacgagctcacaaagaaccaagttagcttgacgtgcctggtgaaggggttctacccctccgacatcgccgtggagtgggagagcaacggccaaccggagaacaattataagaccaccccgcccgtgctggacagcgatgggagcttctttctgtattcaaagctgaccgtcgacaagagcaggtggcagcagggtaacgtgttcagctgcagtgtgatgcacgaggccctgcacaaccactacacccagaaaagcctgagcctgagccctggcaagatcacctgtcccccgcccatgagcgtggagcacgccgacatctgggtgaaaagctacagcctgtactccagggagaggtatatctgcaacagcggcttcaagaggaaggccggaacatcaagcctgaccgagtgcgtgctgaacaaggccaccaacgtggcccactggacgactccctccctgaaatgcatcagggaccccgccctagtgcaccaaaggcccgccccgccctcgggaggtagtgggggcggtgggagcgggggcgggagtggcgggggcggctcgctgcagaactgggtgaatgttatctccgatctgaaaaagatcgaggacctcatccagagcatgcacatcgacgccaccctctacactgagagcgatgtgcatcccagctgcaaggtgaccgccatgaagtgtttcctgctggagctgcaagtaatcagcctggagtccggcgacgccagcatccacgacaccgtggagaatctgataatcctggcgaataacagcctgagttccaacgggaacgtcaccgaaagcggctgcaaggagtgcgaggagctggaagagaagaacatcaaggagttcctgcagtcctttgtgcacatcgtgcagatgttcatcaacacctcc

SEQ ID NO: 969 - DNA, 1389 bp, synthetic construct
  misc_feature 1..1389: note = IL15_Fc_RLI-CO20
  source 1..1389: mol_type = other DNA
atggagacggacaccctcctcctctgggtactcctcctctgggtccccggcagcaccggggagcccaagtcctgcgacaagacccatacctgccctccctgcccggctcccgagctcctagggggtccctccgtcttcctttttcccccgaagcctaaggataccctcatgattagccgcacgcccgaggtcacgtgcgttgtcgtcgccgtaagccacgaagaccccgaggtcaagttcaactggtacgtggacggggtggaggtccacaacgcgaagaccaagccccgggaggagcagtacaactccacctacagggtggtgagtgtgctgacggtgctgcaccaggactggctcaatgggaaggagtacaagtgcaaggtgagcaacaaagcgctgcccgccccgatcgaaaagaccatctccaaggcgaagggccagcccagggagccccaggtgtacaccctgcccccctcccgggacgagctgaccaaaaaccaggtcagcctgacctgcctcgtcaaggggttttaccccagcgacatcgcagtggagtgggaaagcaacggccagcccgaaaacaactataagaccacccctcccgtgctggactccgacggcagctttttcctctactctaagctcaccgtggacaaaagcaggtggcagcaggggaacgtcttcagctgctccgtcatgcacgaggccctccacaaccactacacccagaaaagcctgtccctctcccccgggaagatcacgtgccctccccccatgagcgtggaacatgccgacatctgggtgaagtcctacagcctgtacagccgggaaaggtacatctgcaacagcggcttcaagaggaaggccggaacgtccagcctgacggagtgcgtcctgaataaggccaccaacgtggcccattggaccacccccagcctcaaatgtataagggaccccgcccttgtgcaccaaaggcccgccccgccctccggcggctcgggcggcggcggaagcggaggcggtagcggcgggggcgggagccttcagaactgggtcaacgtgatcagcgacctgaaaaagatcgaggacctgatccagagcatgcacatcgacgccactctgtacaccgaaagcgatgtgcacccctcctgcaaggtgaccgctatgaagtgttttctgctcgagctgcaggtgatctccctggagagcggcgacgccagcatccacgacaccgtggagaacctgataatcctggccaacaacagcctcagcagcaacgggaacgtcaccgagagcggctgcaaggagtgcgaagaactggaggagaaaaacatcaaagagttcctgcagagcttcgtgcacatcgtgcagatgtttatcaacaccagc

SEQ ID NO: 970 - DNA, 1389 bp, synthetic construct
  misc_feature 1..1389: note = IL15_Fc_RLI-CO21
  source 1..1389: mol_type = other DNA
atggagactgacaccctcctcctctgggttcttcttttgtgggtccccggttcaaccggggagccaaagtcctgcgataaaacgcacacgtgcccgccctgccccgccccggagctcctcggcgggccctcggtcttcctcttcccgcccaagccgaaggacaccctcatgatcagccggacccccgaggtcacctgtgtcgtcgtggcagttagccacgaggaccccgaagtcaagttcaactggtacgtggacggcgtcgaggttcacaacgccaagaccaagcccagggaggagcaatacaacagcacctacagggtcgtctccgtgctgaccgtgctgcaccaggactggctgaacggaaaagagtataagtgcaaggtgagcaacaaggccctgccagccccgatcgagaagaccataagcaaggccaagggccagcccagggagccccaggtgtatacgctccctcccagccgggatgagctgaccaaaaaccaggtgtccctgacctgcctggtgaagggcttctaccccagcgacatcgccgtggaatgggagtccaacggacagccggagaacaactacaagaccacaccgcccgtgctggacagcgacggatcattcttcctgtacagcaagctgaccgtggacaagagcaggtggcagcagggcaacgtgttcagctgctccgtgatgcacgaggcgctgcacaatcactacacacagaagtccctgtccctcagcccgggcaagataacgtgcccaccccccatgagcgtggagcacgccgatatctgggtgaagtcctacagcctgtatagcagggagaggtacatctgcaacagcggcttcaagcgtaaggccgggacctccagcctcaccgagtgcgtgctgaacaaggccaccaacgtcgcccactggacgacgccgtccctgaaatgtataagggacccggccctcgtgcaccaaaggcccgccccacctagcggcgggtccgggggagggggcagcggcgggggttcaggcgggggcggcagcctgcaaaattgggtaaacgtgatctccgacctcaagaaaatcgaggatctgatccagagcatgcacatcgacgccaccctgtacacggagagcgacgtacaccccagctgcaaggtgaccgccatgaagtgcttcctgctcgagcttcaagtgatcagcctggagagcggcgacgccagcatccacgacaccgtggagaacctgatcatactggccaataacagcctgagcagcaacgggaacgtgaccgagagcgggtgcaaggagtgcgaggagctggaggagaagaacatcaaagagtttctgcagtccttcgtgcacatcgtgcagatgttcataaacacaagc

SEQ ID NO: 971 - DNA, 1389 bp, synthetic construct
  misc_feature 1..1389: note = IL15_Fc_RLI-CO22
  source 1..1389: mol_type = other DNA
atggaaaccgataccctcctcctctgggtcctcttgctctgggtccccggcagcaccggggagccaaagagctgcgacaagacccacacctgcccaccctgccccgcccccgagctcctcgggggtcctagcgtctttctctttccccccaaacccaaggataccctcatgatcagcaggacccccgaggtcacgtgcgtcgtcgtcgccgtcagccacgaagaccccgaggtcaagttcaactggtacgtagacggagtcgaggtccacaacgcgaagaccaaaccccgcgaggagcagtacaacagcacctaccgtgtggtgagcgtgctgaccgtgcttcaccaggattggctcaatggcaaggagtataagtgcaaggtcagcaacaaggccctgcccgcgcccatcgagaagaccatcagcaaggccaaggggcaacccagggaaccccaggtgtacaccctgccacccagcagggacgagctgaccaagaaccaggtgagcctgacctgcttagtgaaaggtttctaccccagcgacatcgccgtggagtgggagtccaacgggcagcccgagaacaactacaaaaccaccccgccggtgctggacagcgatggcagcttcttcctgtatagcaaactgaccgtggacaagagccggtggcagcagggcaacgtcttctcctgcagtgtgatgcacgaggccctgcacaaccactacacgcagaaaagcctgtcccttagccccggcaagatcacctgcccgccccccatgagcgtggagcatgccgacatatgggtgaagtcctacagcctctacagccgggagaggtatatctgcaacagcggctttaagaggaaggcggggaccagctccctgaccgaatgcgtgctgaacaaggccaccaacgtggcgcactggacaactcccagcctgaagtgcatcagggaccccgccctcgtgcaccaaaggcccgcccctcccagcgggggtagcgggggcgggggaagcgggggcggcagcggtggtggcggaagccttcagaactgggtgaacgtgatctccgatctgaaaaagattgaagatctgatccagagcatgcacatcgacgcaaccctctacaccgagtccgacgtccatccctcctgtaaggtgaccgcgatgaaatgctttctgctggagctccaggtcatctcgctcgagtcaggcgacgccagcatccacgataccgtggaaaatctgatcatcctggccaacaacagcctgagctcgaacgggaatgtgaccgagtccgggtgtaaggagtgtgaggagctggaggagaagaacatcaaggagttcctccagagcttcgtgcacatcgtgcagatgttcatcaacacctcg

SEQ ID NO: 972 - DNA, 1389 bp, synthetic construct
  misc_feature 1..1389: note = IL15_Fc_RLI-CO23
  source 1..1389: mol_type = other DNA
atggagacagacaccctcctcctctgggtcctcctcctctgggtccccggcagcaccggcgagccgaaaagctgcgacaagacccacacgtgcccgccctgcccggcccccgagctcctcggaggacccagcgtgttcctcttcccgcccaagcccaaggacaccctcatgatcagccgcacccccgaggtcacctgcgttgtcgtagccgtctcccacgaggaccccgaggtcaagtttaattggtacgtcgacggcgtcgaagtccataacgccaagacgaagcccagggaggagcagtataacagcacgtatagggtggtgagcgtcctgaccgtgctgcaccaggactggctgaacggcaaagagtacaagtgcaaggtatccaacaaagccctgcctgcccccatcgaaaagacgatctccaaggcgaagggccagccccgagagccccaggtgtacacgctgcccccgtccagggacgagctcaccaaaaaccaggtgagcctcacttgcctcgtgaaggggttctaccccagcgacatcgccgtcgagtgggagtccaatgggcagcccgagaacaactacaagaccaccccacccgtcctggactccgacggctcattcttcctgtattccaagctgaccgtggacaagtccaggtggcagcaaggcaacgtcttcagctgcagcgtcatgcacgaggccctgcacaatcactacacccagaagtcactgagcctgtccccggggaagatcacttgtcccccgcccatgtccgtggagcacgccgatatctgggtgaaaagctacagcctgtactcccgcgagaggtacatctgcaactccgggttcaagcggaaggccggcacctccagcctgaccgagtgcgtgctgaacaaggccaccaacgtggcccactggaccaccccgagcctgaaatgtataagggatcccgcgctcgtgcaccagaggccggcccctccttcggggggcagcgggggtggcggctcaggcggcgggtccgggggtggcgggagcctgcaaaactgggtgaacgtgataagcgacctgaagaagatcgaggacctcatccagtcgatgcacatcgacgccaccctgtacaccgagagcgatgtgcaccccagctgcaaggtgaccgccatgaaatgcttcctcctggagctgcaggtgatctccctggagagcggcgacgcctccatccacgacacggtggagaacctgatcatcctggccaacaattcgctctccagcaacggcaacgtgaccgagagcgggtgcaaggagtgcgaggagctggaggagaaaaacattaaggagttcctgcaatccttcgtgcatatagtccagatgttcattaacaccagc

SEQ ID NO: 973 - DNA, 1389 bp, synthetic construct
  misc_feature 1..1389: note = IL15_Fc_RLI-CO24
  source 1..1389: mol_type = other DNA
atggagacggacaccctcctcctctgggtcctcctcctctgggtccccgggagcacgggcgagcccaagagctgcgacaagacccacacctgcccgccctgccccgcccccgagctcctcggcggcccatccgtcttcctcttcccgcccaagcccaaggacaccctcatgatcagcaggacccccgaggtcacctgcgtcgtcgttgccgtcagccacgaggacccggaggtcaaattcaactggtacgttgacggggtggaggtccacaacgccaagaccaagccccgcgaggagcagtacaattctacataccgggtggtgtccgtgctcaccgtcctgcaccaggattggctgaacggaaaagaatacaagtgcaaagtgagcaacaaggcgctgcccgcccccatcgagaagaccatctccaaggccaagggccagcccagggaaccacaggtgtacaccctgccccccagtagggacgagctcaccaagaaccaggtcagcctgacctgcctggtgaagggattctacccctccgacatagccgtcgagtgggagtccaacgggcagccggagaataactacaagaccaccccgcccgtgctcgatagcgacggctccttcttcctgtacagcaagctgacagtggacaagagcaggtggcagcagggcaatgtgttctcctgttccgtgatgcacgaggccctccacaaccactacacccagaagtccctgtccctgagccccggcaagatcacttgcccaccccccatgagcgtcgagcacgccgacatatgggtgaaaagctacagcctgtactcccgggagaggtacatctgtaactcggggttcaaaaggaaggcgggcacctcctccctgaccgagtgtgttctgaacaaggccaccaacgtggcccactggaccaccccctctctgaagtgtatcagggacccggccctcgtccatcagcgtcccgcccctccctccggaggcagcggcggagggggatcagggggcggcagcggcggtggggggagcctgcagaactgggtgaacgtcatcagcgacctgaagaagatcgaggatctgatacagagcatgcacatcgacgccaccctgtacacggaaagcgacgtgcacccctcctgtaaggtgaccgccatgaagtgcttcctccttgagctccaggtgatcagcctggagagcggcgacgccagcatccacgacaccgtggagaacctgatcatcctggccaacaattcactgagctctaacggcaatgtcaccgagtcgggctgcaaggagtgcgaggagctcgaggagaagaacatcaaggagttcctgcagtccttcgtgcacatcgtacagatgttcatcaataccagc

SEQ ID NO: 974 - DNA, 1389 bp, synthetic construct
  misc_feature 1..1389: note = IL15_Fc_RLI-CO25
  source 1..1389: mol_type = other DNA
atggagacagacaccctcctactctgggtcctcctcctctgggtccccggcagcaccggggaacccaaaagctgcgacaagacacatacctgtcctccgtgccccgcccccgagctcctcggcgggccctccgtcttcctcttcccgcccaagcccaaggatacgctcatgatcagccggactcccgaggtcacgtgtgttgtcgtcgccgttagccacgaggaccccgaagtcaagttcaactggtacgtcgacggcgtcgaggtccacaacgccaagaccaagcccagggaggagcagtacaacagcacctacagggtggtttcggtgctgaccgtgctgcaccaggattggctgaacggcaaggagtacaagtgcaaggtgagcaacaaggccctgcccgcccccatcgagaagaccatcagcaaagccaaggggcaaccaagggagccccaggtctacaccctcccgcccagccgcgacgagctgactaagaaccaggtgagcctgacctgcctggtgaagggcttttaccccagcgacatcgcggtggaatgggagagcaacggccagcccgagaacaactataagaccaccccgcccgtgctggacagcgacggaagcttcttcctctacagcaagctgaccgtggacaagagccggtggcagcagggcaatgtgttcagctgctcagtgatgcacgaggccctgcacaatcactacacccagaagtcgctgagcctgagcccgggaaagatcacatgcccgccccccatgagcgtggaacacgcagacatctgggtgaaaagctactccctgtacagcagggaaaggtacatctgcaactccggcttcaagaggaaggccggcaccagctccctgaccgagtgcgtgctgaataaggccaccaatgtggcccattggacgacgcccagcctcaaatgtatccgagatcccgctttggtgcaccagaggcccgccccgccgtccggcggctccgggggcggcggaagcgggggtggaagcggcggcggcgggtcccttcagaactgggtgaatgtgatctccgacctcaagaagatcgaggacctgatccagagcatgcacatcgacgccacgctctacaccgaatccgacgtgcaccccagctgcaaggttaccgccatgaagtgcttcctcctggagctgcaggtgatcagtctggagagcggcgatgccagcatccacgataccgtggaaaaccttatcatcctggccaacaactccctgagctccaacgggaatgtgaccgagagcgggtgcaaggagtgcgaggaactcgaggagaagaacatcaaggaatttctgcaaagcttcgtgcacatagtgcagatgttcatcaacacgtcc

SEQ ID NO: 975 - protein, 328 aa, Homo sapiens
MCHQQLVISWFSLVFLASPLVAIWELKKDVYVVELDWYPDAPGEMVVLTCDTPEEDGITWTLDQSSEVLGSGKTLTIQVKEFGDAGQYTCHKGGEVLSHSLLLLHKKEDGIWSTDILKDQKEPKNKTFLRCEAKNYSGRFTCWWLTTISTDLTFSVKSSRGSSDPQGVTCGAATLSAERVRGDNKEYEYSVECQEDSACPAAEESLPIEVMVDAVHKLKYENYTSSFFIRDIIKPDPPKNLQLKPLKNSRQVEVSWEYPDTWSTPHSYFSLTFCVQVQGKSKREKKDRVFTDKTSATVICRKNASISVRAQDRYYSSSWSEWASVPCS

SEQ ID NO: 976 - DNA, 984 bp, Homo sapiens
  source 1..984: mol_type = other DNA
atgtgtcaccagcagttggtcatctcttggttttccctggtttttctggcatctcccctcgtggccatatgggaactgaagaaagatgtttatgtcgtagaattggattggtatccggatgcccctggagaaatggtggtcctcacctgtgacacccctgaagaagatggtatcacctggaccttggaccagagcagtgaggtcttaggctctggcaaaaccctgaccatccaagtcaaagagtttggagatgctggccagtacacctgtcacaaaggaggcgaggttctaagccattcgctcctgctgcttcacaaaaaggaagatggaatttggtccactgatattttaaaggaccagaaagaacccaaaaataagacctttctaagatgcgaggccaagaattattctggacgtttcacctgctggtggctgacgacaatcagtactgatttgacattcagtgtcaaaagcagcagaggctcttctgacccccaaggggtgacgtgcggagctgctacactctctgcagagagagtcagaggggacaacaaggagtatgagtactcagtggagtgccaggaggacagtgcctgcccagctgctgaggagagtctgcccattgaggtcatggtggatgccgttcacaagctcaagtatgaaaactacaccagcagcttcttcatcagggacatcatcaaacctgacccacccaagaacttgcagctgaagccattaaagaattctcggcaggtggaggtcagctgggagtaccctgacacctggagtactccacattcctacttctccctgacattctgcgttcaggtccagggcaagagcaagagagaaaagaaagatagagtcttcacggacaagacctcagccacggtcatctgccgcaaaaatgccagcattagcgtgcgggcccaggaccgctactatagctcatcttggagcgaatgggcatctgtgccctgcagt

SEQ ID NO: 977 - protein, 189 aa, Homo sapiens
MLGSRAVMLLLLLPWTAQGRAVPGGSSPAWTQCQQLSQKLCTLAWSAHPLVGHMDLREEGDEETTNDVPHIQCGDGCDPQGLRDNSQFCLQRIHQGLIFYEKLLGSDIFTGEPSLLPDSPVGQLHASLLGLSQLLQPEGHHWETQQIPSLSPSQPWQRLLLRFKILRSLQAFVAVAARVFAHGAATLSP

SEQ ID NO: 978 - DNA, 567 bp, Homo sapiens
  source 1..567: mol_type = other DNA
atgctggggagcagagctgtaatgctgctgttgctgctgccctggacagctcagggcagagctgtgcctgggggcagcagccctgcctggactcagtgccagcagctttcacagaagctctgcacactggcctggagtgcacatccactagtgggacacatggatctaagagaagagggagatgaagagactacaaatgatgttccccatatccagtgtggagatggctgtgacccccaaggactcagggacaacagtcagttctgcttgcaaaggatccaccagggtctgattttttatgagaagctgctaggatcggatattttcacaggggagccttctctgctccctgatagccctgtgggccagcttcatgcctccctactgggcctcagccaactcctgcagcctgagggtcaccactgggagactcagcagattccaagcctcagtcccagccagccatggcagcgtctccttctccgcttcaaaatccttcgcagcctccaggcctttgtggctgtagccgcccgggtctttgcccatggagcagcaaccctgagtccc

SEQ ID NO: 979 - protein, 505 aa, synthetic construct
  REGION 1..505: note = Human IL12B-Linker-IL23A Fusion Protein protein sequence
MCHQQLVISWFSLVFLASPLVAIWELKKDVYVVELDWYPDAPGEMVVLTCDTPEEDGITWTLDQSSEVLGSGKTLTIQVKEFGDAGQYTCHKGGEVLSHSLLLLHKKEDGIWSTDILKDQKEPKNKTFLRCEAKNYSGRFTCWWLTTISTDLTFSVKSSRGSSDPQGVTCGAATLSAERVRGDNKEYEYSVECQEDSACPAAEESLPIEVMVDAVHKLKYENYTSSFFIRDIIKPDPPKNLQLKPLKNSRQVEVSWEYPDTWSTPHSYFSLTFCVQVQGKSKREKKDRVFTDKTSATVICRKNASISVRAQDRYYSSSWSEWASVPCSGGGGGGSRAVPGGSSPAWTQCQQLSQKLCTLAWSAHPLVGHMDLREEGDEETTNDVPHIQCGDGCDPQGLRDNSQFCLQRIHQGLIFYEKLLGSDIFTGEPSLLPDSPVGQLHASLLGLSQLLQPEGHHWETQQIPSLSPSQPWQRLLLRFKILRSLQAFVAVAARVFAHGAATLSP

SEQ ID NO: 980 - DNA, 1515 bp, synthetic construct
  misc_feature 1..1515: note = Human IL12B-Linker-IL23A Fusion Protein nucleic acid sequence
  source 1..1515: mol_type = other DNA
atgtgtcaccagcagttggtcatctcttggttttccctggtttttctggcatctcccctcgtggccatatgggaactgaagaaagatgtttatgtcgtagaattggattggtatccggatgcccctggagaaatggtggtcctcacctgtgacacccctgaagaagatggtatcacctggaccttggaccagagcagtgaggtcttaggctctggcaaaaccctgaccatccaagtcaaagagtttggagatgctggccagtacacctgtcacaaaggaggcgaggttctaagccattcgctcctgctgcttcacaaaaaggaagatggaatttggtccactgatattttaaaggaccagaaagaacccaaaaataagacctttctaagatgcgaggccaagaattattctggacgtttcacctgctggtggctgacgacaatcagtactgatttgacattcagtgtcaaaagcagcagaggctcttctgacccccaaggggtgacgtgcggagctgctacactctctgcagagagagtcagaggggacaacaaggagtatgagtactcagtggagtgccaggaggacagtgcctgcccagctgctgaggagagtctgcccattgaggtcatggtggatgccgttcacaagctcaagtatgaaaactacaccagcagcttcttcatcagggacatcatcaaacctgacccacccaagaacttgcagctgaagccattaaagaattctcggcaggtggaggtcagctgggagtaccctgacacctggagtactccacattcctacttctccctgacattctgcgttcaggtccagggcaagagcaagagagaaaagaaagatagagtcttcacggacaagacctcagccacggtcatctgccgcaaaaatgccagcattagcgtgcgggcccaggaccgctactatagctcatcttggagcgaatgggcatctgtgccctgcagtggcggcggcggcggcggaagcagagctgtgcctgggggcagcagccctgcctggactcagtgccagcagctttcacagaagctctgcacactggcctggagtgcacatccactagtgggacacatggatctaagagaagagggagatgaagagactacaaatgatgttccccatatccagtgtggagatggctgtgacccccaaggactcagggacaacagtcagttctgcttgcaaaggatccaccagggtctgattttttatgagaagctgctaggatcggatattttcacaggggagccttctctgctccctgatagccctgtgggccagcttcatgcctccctactgggcctcagccaactcctgcagcctgagggtcaccactgggagactcagcagattccaagcctcagtcccagccagccatggcagcgtctccttctccgcttcaaaatccttcgcagcctccaggcctttgtggctgtagccgcccgggtctttgcccatggagcagcaaccctgagtccc

SEQ ID NO: 981 - DNA, 1515 bp, synthetic construct
  misc_feature 1..1515: note = IL23-CO01
  source 1..1515: mol_type = other DNA
atgtgccaccagcagctcgtcatcagctggttcagcctcgtcttcctcgcctccccgctcgtcgccatctgggagctcaagaaagacgtgtacgtcgtagagctcgactggtaccccgacgcccccggggagatggtcgtcctcacctgcgatacccccgaggaggacggcatcacctggaccctcgaccagagcagcgaggttttggggtcaggcaagaccctcacgatccaggtaaaggagttcggcgacgcgggccagtacacctgccacaaggggggagaggttctctcccactccctgctgctgctgcacaagaaggaggacggcatctggtccaccgatatcctgaaggaccagaaagagcccaagaacaagacctttctgaggtgcgaggccaagaactacagcggcaggttcacctgttggtggctgaccactatcagcaccgacctgaccttctcggtgaaaagctcgaggggcagcagcgacccccagggggtcacgtgcggcgccgcgacactctccgccgagagggtgaggggcgacaataaagagtacgagtacagcgtggagtgccaggaggactccgcctgtccggccgcggaggagagcctgcccatagaggtgatggtggacgccgtgcacaagctgaagtacgaaaactacaccagcagcttcttcattcgggacatcatcaagcccgacccgcccaagaacctgcagctgaaacccctgaagaacagccggcaggtggaggtgagctgggagtaccccgacacctggagcaccccccacagctacttctccctgacattctgcgtccaggtgcaggggaagtcaaaaagggagaagaaagaccgggtgttcaccgacaagaccagcgccaccgtgatatgcaggaagaacgccagcataagcgtgagggcccaggataggtattacagctccagctggagcgaatgggcctccgtcccctgctcaggcggcggcggcggcggaagcagggcggtgcccggaggcagctctcccgcgtggacccagtgtcagcagctgtcccagaagctgtgcaccctggcctggagcgctcaccccctggtcgggcacatggacctgcgcgaagagggggacgaggagactaccaatgatgtgccccacatccagtgcggcgacggctgcgacccccaggggcttcgggacaactcccaattttgtcttcagaggatccaccaggggctcatattctacgagaaactgctggggagcgacatattcaccggagaacccagcctgctgccagacagccccgtgggccagctgcatgctagcctgctggggctgagccagctgctgcagccggaggggcaccactgggagacgcagcagatccccagcctgtcgcccagccagccctggcagaggcttctgctgcgcttcaagatcctgcgaagcctgcaggccttcgtggcggtggccgcgagggtgttcgcgcacggcgccgccaccctgagcccg

SEQ ID NO: 982 - DNA, 1515 bp, synthetic construct
  misc_feature 1..1515: note = IL23-CO02
  source 1..1515: mol_type = other DNA
atgtgccatcagcagttggtaatcagctggttctcccttgtcttcctcgccagcccgctcgtcgccatctgggagctcaagaaggacgtgtacgttgtcgagctcgattggtaccccgacgcccccggcgagatggtcgtcctcacttgcgacacccccgaggaggacgggatcacctggacgcttgaccagtcctccgaggtcctcgggagcggcaagaccctcaccatccaggtcaaggagttcggggacgcggggcaatacacctgccacaaagggggcgaggttctcagccacagcctgctgctgctgcataagaaggaggacggcatctggtccacggacatcctgaaggaccagaaagagcccaagaacaagactttcctcaggtgcgaggccaagaactacagcggccggtttacctgctggtggctgaccaccatctcaaccgacctcaccttcagcgtgaaaagcagccggggctcatccgacccccagggcgtgacctgcggcgccgccaccctgagcgccgaaagggtgcggggcgacaacaaagagtacgagtacagcgtcgagtgccaggaagactccgcctgtcccgccgccgaagagagcctgcccatcgaggtgatggtggacgcggtccacaagctgaagtacgagaactacacctcgagcttcttcattcgggatatcatcaagcccgatccccctaagaacctgcagctgaagcccctgaagaacagccgccaggtggaggtgtcctgggagtacccggacacatggtccacgccccactcctatttcagcctgaccttctgcgtgcaggtgcagggaaagagcaagagggagaaaaaggacagggtgttcaccgacaagaccagcgccaccgtgatctgccggaagaacgcctcgatcagcgtgcgcgcccaggaccggtactactcctccagctggagcgagtgggccagcgtgccgtgctcagggggcggcgggggcgggagcagggccgttccaggcggtagctcaccagcgtggacccagtgccagcagctgtcccagaagctgtgcaccctggcctggagcgcccaccccctggtcgggcacatggacctgagggaggagggcgacgaggagactaccaacgacgtgccccacattcagtgcggcgacgggtgcgacccccagggcttgcgtgacaactcccagttctgcctgcagaggatccaccagggcctgatcttttacgagaagctgctgggctccgacatcttcaccggggagccctcactgctgccggacagccccgtcggccagctgcacgccagcctcctcggtctgagccaactgctgcagccagaggggcaccactgggagactcagcagatccccagcctgagcccctcccagccctggcagcggctgctcctgcgcttcaagatcctgaggagcctgcaggccttcgtggccgtggctgcccgcgtgttcgcgcacggggccgccaccctgtccccc

SEQ ID NO: 983 - DNA, 1515 bp, synthetic construct
  misc_feature 1..1515: note = IL23-CO03
  source 1..1515: mol_type = other DNA
atgtgccaccagcagctcgttataagctggttcagcctcgtcttcctcgcctccccgttggtcgccatctgggagctcaagaaagacgtatacgtcgtcgagttggactggtaccccgacgcccccggcgagatggtcgtcctcacgtgtgacacacccgaagaggacggcatcacgtggacgctcgaccagtcgagcgaggtcctcggctccggcaagaccctcaccatccaggtcaaggagttcggcgacgcaggccagtatacctgccacaagggcggggaggtccttagccacagcctgctgctgctgcacaagaaggaggacgggatctggtccaccgacattctgaaggaccagaaggagcctaaaaacaagaccttcctccggtgcgaggccaagaattactccgggaggttcacctgctggtggttgaccaccatcagcaccgacctgaccttctccgtcaagagctcaaggggcagctccgacccccagggcgtgacctgcggggccgccaccctgtctgcggagagggtgcgcggggacaacaaagagtacgagtacagcgtggagtgccaggaggactccgcctgtcccgccgccgaagagagcctgcccatcgaggtgatggtggacgccgtgcataagctgaagtacgaaaattacaccagcagctttttcataagggatataatcaagcccgatccgcccaagaacctccagctgaagccgctgaagaacagcaggcaggtggaggtcagttgggagtatccagatacctggtccaccccccacagctacttcagcctgaccttctgcgtgcaggtgcagggcaaaagcaagagggaaaagaaggacagggtgttcaccgacaagaccagcgcgacggtcatctgtaggaagaatgcctccatcagcgtccgcgcgcaggaccggtactacagcagcagctggtcagagtgggccagcgtgccctgcagtggcggcggagggggagggagtcgggccgtgccggggggcagtagccccgcctggacacagtgccagcagctgtcccaaaagctgtgtacgctggcctggtccgcacaccccctcgtggggcatatggacctgagggaggagggggacgaggagactaccaacgatgtgccccacatacagtgcggggatggctgcgacccgcagggccttcgcgacaatagccagttctgcctgcaacgcatccaccagggcctgatcttctacgagaagctgctgggatcggacatcttcaccggggagcccagcctgctgccggactcccccgtggggcaactgcacgccagcctgctgggcctgtcacaactgctccagcccgaggggcaccattgggagactcaacagatccccagcctgagccccagccagccctggcagaggctcctgctgaggttcaaaatcctgcgtagcctgcaggccttcgtggccgtggccgccagggtcttcgcccacggcgccgccaccctgtcccca

SEQ ID NO: 984 - DNA, 1515 bp, synthetic construct
  misc_feature 1..1515: note = IL23-CO04
  source 1..1515: mol_type = other DNA
atgtgccaccagcagctcgtaatcagctggttttccctagtcttcctcgccagcccgctagtcgccatttgggagctcaagaaggacgtctacgtagtcgagctcgattggtatcccgacgctccgggcgagatggtcgtgctcacttgtgacactcccgaggaggacggcatcacctggactctcgatcagagctccgaagtccttgggagcggcaagacccttaccatccaggtcaaggagttcggcgacgccggccagtacacctgccacaaagggggcgaggtcctcagccacagcctgctgctgctccataagaaggaggacggcatctggtccaccgacatcctgaaggaccagaaggaacccaagaacaagaccttcctgaggtgcgaagccaagaactacagcggccggttcacctgctggtggctgaccaccatctctacggacctgaccttctccgtgaaaagcagcaggggctcctccgacccgcagggcgtgacctgcggcgccgccaccctcagcgccgagagggtgaggggcgacaacaaagagtacgagtacagcgtggaatgccaggaggacagcgcctgccccgccgccgaggagagcctgccgatcgaggtgatggtggacgccgtgcacaagctgaagtacgaaaactacacctcctccttcttcatcagggacatcatcaaacccgacccgcccaagaacctgcaactcaagcccctgaagaactccaggcaggtggaggtgtcatgggagtaccccgacacctggagcaccccccacagctacttcagcctcacgttttgcgtgcaggtacagggcaaaagcaagagggagaagaaggatagggtgttcaccgataaaacctccgccaccgtgatctgcagaaagaacgccagcataagcgtgcgggcccaggacaggtactacagctccagctggagcgagtgggccagcgtgccctgcagcgggggcggagggggtgggtcccgcgccgtgccaggtgggagcagccccgcttggactcagtgccagcagctgagccaaaagctgtgcaccctcgcgtggtccgcccacccgctggtgggccatatggatctgagggaggagggggacgaagagactaccaacgacgtcccccacatccaatgcggtgatgggtgcgacccccagggcctgcgggacaactcccagttctgccttcagaggatccaccagggcttgatcttttacgagaaactgctgggaagcgacatcttcaccggcgaacccagcctgctgcccgactcccccgtggggcagctgcacgcgagcctgctggggctgagccagctgctgcagcccgagggccaccattgggagactcagcagatccccagcctgagtcccagccagccgtggcagcggctgctgctgcgattcaagatcctgaggtcgctacaggcctttgtggccgtggcggccagggtgttcgcccatggcgcagccaccctctccccc

SEQ ID NO: 985 - DNA, 1515 bp, synthetic construct
  misc_feature 1..1515: note = IL23-CO05
  source 1..1515: mol_type = other DNA
atgtgccaccagcaattggtcatctcctggttcagcctcgtcttcctcgcgagccccctcgtagccatctgggagctaaagaaggacgtctacgtcgtcgagctcgactggtaccccgacgcccccggggagatggtcgtcctcacctgcgacaccccggaggaggacggcatcacgtggaccctcgaccaatcgtccgaggttctcgggtccggcaagaccctcaccatccaagtcaaggagttcggcgacgcgggccagtacacctgccacaagggcggggaggtcctcagccactcgctcctgctgctccacaagaaagaggacggcatctggagcacggacatcctgaaggaccagaaggagcccaagaacaagaccttcctgcgctgcgaggccaagaactacagcgggaggttcacctgctggtggctcaccacaatcagcaccgacctcaccttcagcgtgaaaagcagccgcggcagcagcgatccacagggggtgacctgcggcgccgccaccctgagcgccgagagggtgcggggagacaacaaggagtacgagtacagcgtggagtgccaggaggacagcgcctgtccggcggccgaggagagcctgcccatcgaggtgatggtggacgccgtccacaagctgaagtacgaaaactacacttccagcttcttcatccgggatatcatcaagcccgacccgcccaaaaacctgcagctgaagccgctgaagaacagccgccaggtggaggtcagctgggagtaccccgacacctggagcaccccccatagctacttctccctgaccttctgcgtgcaggtgcaggggaagtccaagagggagaagaaggacagggtgttcaccgacaaaaccagcgccacggtgatctgccgaaagaacgccagcatcagcgtgagggcccaggaccgctactattcctccagctggtccgaatgggcgagcgtgccctgcagtggcggaggaggaggcggcagcagggccgtgcccggcggctccagccccgcatggactcagtgccagcagctgagccagaaactgtgcacgctggcctggagcgcccatcccctggtcgggcatatggacctgagggaggagggcgacgaagagacgactaacgatgtgccccacatccagtgcggggacggttgcgacccccagggcctgcgggacaacagccagttttgcctccagcggatccaccagggcctgattttttacgaaaagctgctgggcagcgacatcttcaccggcgagcccagcctgctgcccgacagcccagtgggccaactgcacgcctccctgctcggcctgagccagctgctgcagcccgagggccatcactgggagacgcagcagatcccctccctgagcccctcccagccctggcagaggctcctgctgcgcttcaagatcctgaggagcctgcaggccttcgtcgccgtggccgcccgggtgttcgcccacggggccgccacactgagcccg

SEQ ID NO: 986 - DNA, 1515 bp, synthetic construct
  misc_feature 1..1515: note = IL23-CO06
  source 1..1515: mol_type = other DNA
atgtgtcatcagcagctcgtcatcagctggttcagccttgtcttcctcgcgagtcccctcgtagccatctgggaactcaagaaggacgtctacgtcgtcgagctcgactggtaccccgacgcccccggggagatggttgtcctcacctgcgacacgcccgaggaggacggcatcacgtggaccctcgaccaaagctccgaggtcctcgggagcggcaagaccctcacaatccaggtcaaggagttcggcgacgccgggcagtacacgtgccacaaggggggcgaagtcctcagccactccctgctgctgctccataagaaggaggacgggatatggagcaccgacatcctaaaggatcagaaggagcccaaaaacaagaccttcctcaggtgtgaggccaagaactacagcggccgtttcacctgctggtggctgaccaccatatctaccgacctgaccttcagcgtgaaaagcagcaggggctcgagcgacccccagggcgtgacgtgcggcgccgcgacgctgagcgccgagcgcgtgcggggcgacaacaaggagtatgaatactccgtggaatgccaggaggatagcgcctgcccggccgcggaggagtccctccccatcgaggtgatggtggacgccgtccacaagctgaagtatgagaattacaccagcagcttcttcatccgcgacatcatcaagccggacccacccaagaatctgcagctgaaaccgctcaagaactccaggcaggtggaggtgtcctgggagtatcccgacacatggtccacgccccacagctacttctccctgacgttctgtgtacaagtgcagggcaagtccaaaagggagaaaaaggacagggtgttcaccgacaagacctccgccaccgtgatctgcaggaagaacgccagcatcagcgttcgcgcccaggaccgctactactccagctcatggagtgaatgggcctccgtcccctgcagcggaggcggaggcggcggaagccgagccgtgcccggcgggtccagtcccgcctggacccagtgccagcaactgagccaaaagctgtgcaccctggcgtggtccgcccaccccctggtgggccacatggacctgcgggaggagggtgacgaggagacgaccaacgacgtgcctcacatccagtgcggtgacggctgtgacccccagggcctgagggacaacagccagttctgcctgcagaggatccaccaagggctgatcttctacgagaaattgctgggcagcgacatcttcaccggggaacccagcctgctgcccgactcgcccgtgggccagctgcatgcgtccctcctgggcctgtcccagctgctacagcccgagggccatcattgggagacgcagcagatcccctccctgagcccgagccaaccctggcagaggctgctgctccggttcaagatcctgcggtccctgcaggccttcgtcgccgtggccgcccgcgtgttcgcccacggggccgccaccctgagcccc

SEQ ID NO: 987 - DNA, 1515 bp, synthetic construct
  misc_feature 1..1515: note = IL23-CO07
  source 1..1515: mol_type = other DNA
atgtgccaccagcagctcgtaatcagctggttctcgcttgtattcctcgccagccccctcgttgccatctgggagctcaagaaggacgtatacgtcgtagagctcgactggtatcccgacgcccccggggagatggtggtcctcacctgtgacacccccgaggaggacggcatcacctggaccctcgaccaaagctccgaggtcctcgggtccggcaagaccctcaccatccaggtcaaggaattcggagacgccggccagtacacctgccacaaaggcggcgaggtactctcccattccctgctcctgctgcataagaaggaggacgggatctggagcaccgatattctgaaggatcagaaggagcccaagaataagaccttcctgaggtgcgaggccaagaactactcaggccgcttcacctgctggtggctcaccacgatcagcaccgacctcaccttcagcgtgaaatccagcaggggtagctcggatcctcagggcgtgacatgcggggccgccaccctgagcgccgagagggtgcggggcgacaacaaggagtacgaatacagcgtggagtgccaggaggactccgcgtgccccgccgcggaagagagcctgcccatcgaggtaatggtggacgccgtgcacaagctcaagtacgagaattacaccagctctttcttcatccgggatatcatcaagcccgaccctcccaagaacctgcagctgaaacccctgaagaacagccgtcaggtagaggtgagctgggagtaccccgatacgtggagcaccccccatagctacttttccctgaccttttgtgtgcaggtgcagggcaagtccaagagggagaagaaggacagggtgttcaccgacaagacgtccgccaccgtgatctgcaggaagaatgcctccatctccgtgagggcccaggaccgctactacagcagctcctggtccgagtgggcctctgtcccctgctccggcgggggcggaggcggcagcagagccgtgcccggcggcagcagccccgcatggacccaatgccaacagctgagccaaaaactgtgcacgctcgcatggagcgcccacccgctggtggggcacatggacctgagggaggaaggcgatgaggagacgacaaacgacgtgccccacatccagtgcggcgatggctgcgacccgcagggcctgcgcgacaacagccagttctgtctgcagcgtatccaccagggcctcatattctatgagaagctgctgggctccgacatcttcaccggcgagcccagcctgctgcccgactcccccgtgggacagctccacgccagtctgctgggcctgagccagctgctgcagcccgagggccaccactgggagactcagcagatcccgagcctgagccccagccagccatggcaaaggctgctgctcaggttcaagatcctgaggagcctgcaggccttcgtggccgtggccgccagggtctttgcccacggggccgccaccctctccccg

SEQ ID NO: 988 - DNA, 1515 bp, synthetic construct
  misc_feature 1..1515: note = IL23-CO08
  source 1..1515: mol_type = other DNA
atgtgccaccagcagttggtcatctcgtggttcagcctcgtctttcttgcctcccccttggtcgccatctgggagctcaagaaagacgtctacgttgtcgagctcgattggtatcccgacgcgccgggcgaaatggtcgtccttacgtgcgacacgccagaagaggacggtatcacgtggaccctcgatcagtcctcggaggtcctcggcagcggcaagaccctcaccatccaggtcaaggagttcggggacgccggccagtacacctgccacaagggcggggaagtactcagccattccctgctgctgctgcacaagaaggaggacgggatctggtccaccgacatcctgaaggaccagaaggaacccaagaacaagacctttctgcgctgtgaggcaaagaactactctgggcggttcacctgttggtggctgaccaccatcagtaccgacctgaccttctctgtgaaaagcagcaggggcagcagcgacccccaaggcgtgacctgcggcgccgccactctgtccgccgagcgcgtaaggggggacaacaaagagtacgaatatagcgtggaatgccaggaggacagcgcctgccccgccgcggaggagagcctgcccatcgaagtgatggtggacgcggtccacaagctcaagtacgaaaactacaccagctccttcttcatcagggacatcattaagccggaccccccgaagaacctgcagctgaagccgctgaaaaacagccgtcaggtcgaggtgagctgggagtaccccgacacctggtccaccccgcactcctatttcagcctgactttctgcgtgcaggtccagggcaagagcaagcgggagaagaaggaccgggtgttcaccgataagaccagcgccaccgtcatctgccgaaagaacgcctccatcagcgtgagggcccaggacaggtactacagcagcagctggagcgagtgggcctctgtgccctgcagcgggggaggcgggggcggcagcagagcggtgccggggggtagctctcccgcctggacccagtgtcaacagctcagccagaagctgtgcaccctggcctggtccgcccacccgctggtgggccacatggacctgagggaggaaggcgatgaggaaaccacgaacgatgtgccgcacatccagtgcggcgacgggtgcgacccgcagggcttgcgtgataatagccagttctgcctccagcggatccaccagggactgatcttctacgagaaactgttgggctcggacatctttaccggcgagcccagcctcctgcccgacagccccgtgggtcagctgcacgcgagcctgctgggcctcagccagctcctgcagcccgaagggcaccactgggaaacccagcaaattccaagcctgagcccctcgcagccctggcagcggctgctgctgcggttcaagatcctcaggtccctgcaggccttcgtggcggtggctgcccgggtcttcgcccacggcgcggcaacgctgagcccc

SEQ ID NO: 989 - DNA, 1515 bp, synthetic construct
  misc_feature 1..1515: note = IL23-CO09
  source 1..1515: mol_type = other DNA
atgtgtcaccagcagctcgtcataagctggttctcactcgtcttcttggccagcccactagtcgccatctgggagctcaaaaaggacgtctacgtggttgagctagactggtaccccgacgcccccggggagatggttgtcctcacctgcgatacgcccgaagaggacggcatcacctggaccctcgaccagtccagcgaggtcctcgggtccggcaaaaccctcaccatccaggtcaaggagttcggggacgccggccagtacacctgtcacaagggaggcgaggtcctatcccatagcctcctgctgctgcataagaaggaggatggtatctggagcaccgacatcctgaaggaccaaaaggagccgaagaacaagacgttcctccggtgcgaggccaagaactacagcgggcgattcacgtgctggtggctcaccaccatctccaccgacctgaccttctccgtgaaaagcagccgcggctccagcgacccccagggggtgacctgcggcgccgccaccctgtccgctgagcgcgtgcggggcgacaacaaggagtacgaatacagcgtggagtgccaggaggactccgcctgccccgccgccgaggagagcctgcccattgaggtgatggtggacgctgtgcataaactgaagtacgagaactacacctccagtttcttcatcagggacatcatcaagcctgacccgcccaagaacctccagctgaagcccttgaagaactcgaggcaggtggaagtctcgtgggaataccccgacacctggagcacgccccacagctacttctccctgaccttctgcgtgcaggtgcagggcaaaagcaagagggagaagaaggacagggtgttcaccgacaagacaagcgcgaccgtgatctgcaggaagaacgccagcatatccgtgcgcgcccaagaccgctactacagcagctcgtggtcggagtgggcaagcgtgccatgctcaggcggcggcggcgggggctccagggccgtgcccgggggcagcagccccgcttggacccaatgtcagcagctgtcccagaagctgtgcactctggcctggagcgcccaccccctggtgggtcatatggacctgcgggaggagggcgatgaagagacgaccaacgacgtgccccatatccagtgcggggacgggtgtgacccccagggcctgagggacaactcgcagttttgcctgcagaggatccaccagggcctgatcttttatgaaaaactactggggagcgacatcttcaccggcgagccctccctcctgcccgactcccccgtggggcaactgcatgccagcctgctgggcctgagccagctgctgcagccggaggggcatcactgggagacgcagcagatcccctcgttgtccccctcccagccctggcagaggctgctcctcaggtttaagatcctgcggagcctgcaggccttcgtggccgtggcagcccgggtgttcgcccacggggcggccaccctctcgccc

SEQ ID NO: 990 - DNA, 1515 bp, synthetic construct
  misc_feature 1..1515: note = IL23-CO10
  source 1..1515: mol_type = other DNA
atgtgtcaccagcagctcgtcatcagctggttctccctcgtatttctcgccagccccctcgtcgccatctgggagctcaagaaggacgtgtacgttgtagagctcgactggtatcccgacgcccccggcgagatggtggtgctcacctgcgacacccccgaggaagacggcataacctggaccctcgaccagtcctccgaggtactagggtcgggtaaaaccctcaccatccaggtcaaggaattcggcgacgccgggcagtacacctgccacaagggcggcgaggtcctctcgcacagcctgcttctgctccacaagaaggaagacggcatctggagcacggacatcctgaaggaccagaaggagccgaagaacaaaacgttcctgaggtgcgaggctaagaactacagcggccggttcacctgctggtggctgacgaccatcagcacggacctcaccttcagcgtgaaaagcagcagggggagcagcgatccccagggggtgacgtgcggcgccgccaccctgagcgccgagcgcgtgcggggcgataacaaagagtacgagtacagcgtggaatgtcaggaggacagcgcctgccccgccgccgaagagagcctccccatagaggtgatggtggacgccgtccacaagctgaagtacgaaaactacactagctcctttttcatcagggacataatcaagcccgacccacccaagaacctgcagctgaagcccctcaagaacagcaggcaggtggaggtgtcctgggagtaccccgacacttggagcaccccccacagctactttagcctgaccttctgcgtgcaggtgcagggaaagtccaagcgagagaagaaggacagggtgttcaccgacaagacctccgccaccgtaatctgccggaagaacgccagcatctccgtgagggcccaggataggtactacagctccagctggagcgagtgggcctccgtgccctgtagcggaggcggcggcgggggctccagggctgtgcccggcggctcatcccccgcctggacacagtgccagcagctgagccaaaagctgtgcacactggcgtggagcgcccacccgctcgtgggccacatggacctgcgggaggaaggggacgaggagacaacgaacgacgtccctcacatccaatgcggtgatggctgtgatccgcagggcctcagggacaacagccagttctgtctgcagaggatccaccagggcctcatcttctacgagaagctgctgggcagcgacatcttcaccggggagcccagcctgctgcccgacagcccggtgggccaactgcacgccagcctgctggggctcagccagctgctgcagccggagggacaccactgggaaacccagcagatcccgtccctgagccccagccagccctggcagcgcctgctcctgaggttcaagatcctgcgctccctgcaggccttcgttgccgtggcggctcgcgtgtttgcccacggggccgccaccctgagcccc

SEQ ID NO: 991 - DNA, 1515 bp, synthetic construct
  misc_feature 1..1515: note = IL23-CO11
  source 1..1515: mol_type = other DNA
atgtgccaccagcagctcgttatcagctggttcagtctcgtcttcctcgcctcccccctcgtcgccatctgggaactaaagaaggacgtctacgtcgtagagctcgactggtaccccgacgcccccggcgagatggtcgtcctcacctgcgacactccagaggaggacggaatcacctggaccctcgaccagagcagcgaggtcctcggcagcggcaagaccctcaccatccaggtcaaagaattcggcgacgccggccagtacacctgccataaggggggagaggtactcagccacagcctgctgctactccacaagaaggaggacggcatctggtccaccgacatcctgaaggaccagaaggaacccaagaacaagactttcctgaggtgcgaggccaagaattatagcggcaggttcacctgctggtggctgaccaccatcagcaccgacctgaccttctccgtgaaatccagcagggggagctccgacccacagggcgtcacgtgcggcgccgccacgctgtccgccgagcgagtgcgcggcgacaacaaggagtacgagtactccgtcgagtgccaggaggacagcgcgtgccccgccgccgaagagtcgctgcccatagaggtgatggtggatgccgtccacaagctgaagtatgaaaactacacctccagcttcttcatccgcgacatcatcaagcccgaccctcccaagaacctgcagctgaaaccgttaaagaactccaggcaggtggaggtcagctgggagtaccccgacacctggtccaccccgcacagctacttcagcctcaccttctgcgtgcaggtgcaaggcaaaagcaagcgggagaagaaagaccgggtcttcaccgataagacctcagccaccgtgatctgccgcaagaatgcctccatttcagtgcgggcgcaggaccgctactattccagctcctggagcgagtgggccagcgtcccttgctccggcgggggaggaggcggctcgagggccgtgcccggaggatcgagccccgcctggactcagtgccagcagctgtcccagaaactgtgcaccctggcctggtccgcccaccccctggtgggccacatggacctgcgcgaggagggggacgaggagacgaccaacgacgtgccccacatccagtgcggggacgggtgcgacccccaggggctcagagacaactcccagttctgtctgcagcggatccatcaagggctgatcttctacgagaagctgctggggtcagacatctttaccggcgagcccagtcttctgcccgacagccccgtggggcagctccatgccagcctgctggggctgagccagctgctgcagcccgagggccaccactgggagactcaacagatccccagcctgtcgccctcccagccctggcagaggctgctgctgcggttcaaaatcctcaggagcctgcaggccttcgtcgccgtggccgccagagtgttcgcgcacggcgccgcgacgctctcgccc

SEQ ID NO: 992 - DNA, 1515 bp, synthetic construct
  misc_feature 1..1515: note = IL23-CO12
  source 1..1515: mol_type = other DNA
atgtgccatcagcagctcgtcatcagctggttcagcctcgtcttcttggccagccccctcgtcgccatctgggagctcaagaaagacgtgtacgtcgtcgagctggactggtaccccgacgcccccggcgagatggtcgtcctaacctgcgacacccccgaggaggacggcatcacgtggaccctcgaccagagcagcgaggtcctcggcagcggaaaaaccctaaccatacaggttaaggagttcggcgacgccggccagtacacctgccacaaggggggcgaggtcctatcccacagcctgctgctgctgcacaaaaaagaggacggcatctggagcaccgatatcctgaaagaccagaaggaacccaaaaataagaccttcctgaggtgcgaggcaaagaattacagcggcaggttcacctgctggtggctgaccaccatctccacggacctgaccttcagcgtgaaaagctcgaggggcagcagcgacccgcagggcgtgacctgtggcgcggccaccctgagcgccgagcgcgtgaggggcgacaacaaggagtacgaatactccgtggagtgccaggaggattcggcctgccccgccgccgaggagtccctccccatcgaggtgatggtggacgccgtgcacaagctgaagtatgagaactacacctcaagcttcttcatcagggacatcatcaagcccgacccgcccaaaaacctccaactgaagcccctgaagaacagccggcaggtggaggtgtcctgggagtaccccgatacctggtccaccccgcactcctacttcagcctgacgttctgcgtgcaggtgcagggcaagtccaagcgagagaaaaaggaccgcgtgttcaccgacaagaccagcgccaccgtgatctgtcgcaaaaacgcctccatcagcgtgcgcgcccaggaccggtactacagcagcagttggagcgagtgggccagcgtgccatgtagcgggggcggcgggggcggctccagggccgtgcccgggggatcgtcgccagcctggacccagtgccagcaactcagccaaaagctgtgcaccctcgcctggagcgcgcaccccctggtcggacacatggatctgagggaagagggcgatgaggagacaaccaacgacgtgccccacatccagtgtggggacggctgcgatccccagggcctgcgagataacagccagttctgtctccagcgaatccatcaggggctgatcttctacgagaaactgttgggctccgacatcttcaccggcgagcccagcctgctgcccgacagccccgtagggcagctccacgcctccctgctggggctgtcgcagctgctgcagcccgaggggcaccactgggaaacgcagcagatccccagcctcagccccagccaaccctggcagaggctgctgctgaggttcaagatcctgcgttccctgcaggccttcgtggcggtggccgccagggtcttcgcacacggcgccgcaaccctgtccccg

SEQ ID NO: 993 - DNA, 1515 bp, synthetic construct
  misc_feature 1..1515: note = IL23-CO13
  source 1..1515: mol_type = other DNA
atgtgccatcagcaactcgtcatctcctggttctccctagtcttcctcgccagccccctcgtagccatctgggagctcaagaaagacgtatacgtcgtagagctcgactggtacccggacgcccccggggagatggtcgtactcacctgtgacaccccggaggaagacgggatcacgtggaccctcgaccaatcctccgaggtccttgggagcggcaaaacgctcaccatccaagtcaaggagttcggcgacgccggacagtatacctgccacaaagggggagaggtccttagccacagcctcctcctgctgcacaagaaggaggatggcatctggtccaccgacatactgaaggaccagaaagagcccaagaacaaaacgttcctgcggtgcgaggccaagaattacagcggacggttcacctgctggtggctgacgactatcagcaccgatctgaccttcagcgtgaagtccagcaggggctccagcgacccacagggggtgacctgcggcgccgccacactcagcgccgagagggtgcggggtgacaataaagagtacgagtatagcgtggagtgccaggaggactccgcgtgtcccgccgccgaggagtccctgccgatcgaggtgatggtggacgccgtgcacaagctcaagtacgagaactatacctccagctttttcatcagggacatcatcaagcccgacccacccaaaaatctccagctgaagcccctgaagaacagccgccaggtggaggtgagctgggagtacccggacacgtggtccaccccacacagctacttctccctgaccttttgcgtgcaagtgcagggcaagagcaagagggagaagaaggacagggtgttcactgataagaccagcgccaccgtgatctgcagaaagaacgccagcatctccgtgagggcccaagaccggtactattccagctcctggtccgaatgggcctccgtgccctgtagtggcggtggcggtggggggagtagggcggtgcccggcggcagcagccccgcatggacccagtgccagcagctgtcccagaaactgtgtaccctggcctggtccgcccatcccctggtcggccacatggacctgcgcgaggagggcgacgaggagacaacaaatgacgttccccacatccagtgcggcgacggctgcgacccacagggcctgagggacaacagccagttctgcctgcagcgcatccaccagggcctcatcttctacgagaagctgctgggctcggacatcttcaccggggagcccagccttctgcccgactcccctgtgggccagctgcatgccagcctgctgggcctgtcgcagctcttgcagcccgagggccaccactgggagacgcaacaaatccctagcctgagcccctcccagccctggcagaggctgctgctccgcttcaaaatcctgagatccctccaggccttcgtcgccgtcgccgcccgggtgtttgcccacggcgcggccaccctgtccccc

SEQ ID NO: 994 - DNA, 1515 bp, synthetic construct
  misc_feature 1..1515: note = IL23-CO14
  source 1..1515: mol_type = other DNA
atgtgccaccagcagctcgtcatcagctggttctccctcgtcttccttgcctccccacttgtcgccatctgggagctcaaaaaggacgtctacgtcgtcgagctcgactggtaccccgacgcccccggggagatggtcgtcctcacctgcgacaccccggaggaagacggcattacctggaccctcgaccagagcagcgaagtcctcgggtccggaaaaaccctcaccatccaggtcaaggagttcggcgacgccgggcagtacacgtgccacaaagggggagaggttctcagccactccctcctgctgctgcacaagaaggaggacggaatctggtccaccgacatcctcaaggaccagaaggagcccaaaaacaagaccttcctcaggtgcgaggccaagaactactccggccggtttacctgctggtggctgaccaccatcagcaccgacctcacctttagcgtcaagtcctcccggggcagcagcgacccacagggcgtgacctgtggcgccgcgaccctgagcgccgagcgcgtgaggggcgacaataaggagtacgagtacagcgtggagtgtcaggaggacagcgcctgccccgccgcggaggagagcctgcccatcgaggtgatggtagacgccgtgcacaagctgaagtatgagaattacacctccagcttcttcatccgcgacataatcaagccggaccctcccaagaacctgcagctgaagccgctgaagaacagcaggcaggtagaggtgagctgggagtaccccgatacatggtccacgccccatagctacttctccctgaccttctgcgtgcaggtgcaaggcaagagcaagcgggagaagaaagaccgggtgttcaccgacaagaccagcgccaccgtgatctgccgaaagaacgccagcataagtgtgcgggcccaggacaggtactactcctcgtcctggtccgagtgggcctcagtgccctgttcgggcggtgggggcggcgggtcccgcgccgtgccaggagggagcagcccagcttggacccaatgccagcaactgtcccagaagctgtgtaccctggcctggagcgcccacccactggtggggcacatggacctcagggaggagggcgatgaggagactaccaacgatgtgccccacatccagtgcggcgacggctgcgacccccagggcctgagggacaattcccagttctgcctgcagcggatccatcagggcctcatcttctacgagaaactgctcggctccgatatctttaccggggagccctccctgctgccggacagcccggtgggccaactgcacgccagcctgctgggcctgtcccagctgctgcagcccgagggccaccactgggagacgcaacagatcccaagcttgtccccatcacagccctggcaaaggctgctgctgaggtttaagatcctgaggagcctgcaggccttcgtggccgtggccgccagggtgttcgcccatggcgccgccaccctgtccccc

SEQ ID NO: 995 - DNA, 1515 bp, synthetic construct
  misc_feature 1..1515: note = IL23-CO15
  source 1..1515: mol_type = other DNA
atgtgccaccagcagctcgtcattagctggtttagcctcgtcttcctcgccagcccactcgtcgccatctgggagctcaagaaggacgtctacgtcgtcgagctcgactggtaccccgacgccccgggcgaaatggtcgtcctcacctgtgatacccccgaggaggacggcatcacctggaccctcgaccagtccagcgaagtcctcggcagcgggaagacccttaccatccaggtcaaggagttcggcgacgccgggcagtacacctgccataagggcggcgaggtcctctcccatagcctcctgctgctccacaagaaggaggatggaatttggagcaccgacatcctgaaggatcagaaggaacccaagaacaagaccttcctgcggtgtgaggccaagaactactcgggcaggttcacgtgctggtggctgaccacaatcagcaccgatctcacctttagcgtgaagtcgagcaggggcagcagcgacccccagggcgtgacctgtggcgcggcaaccctgtccgccgaacgcgtgaggggggataacaaggagtatgagtactctgtggagtgccaggaggactccgcctgccccgccgccgaggagagcctgcccatcgaggtgatggtggacgccgtgcacaagctgaaatacgaaaactacacgagctcgttcttcatcagggacatcatcaaacccgacccccctaagaacctgcagctcaagcccctcaagaacagcaggcaagttgaggtgtcctgggagtaccccgacacatggagcaccccccatagctacttctcgctgacgttctgcgtgcaggtgcagggcaagtccaagcgggagaagaaggatcgagtctttaccgacaagaccagcgccaccgtcatctgccggaagaacgccagcatcagcgttagggcgcaggatagatactattcctccagctggtccgaatgggccagcgtgccctgtagtggcggcgggggcggcggcagcagggctgtgcccggtgggagcagccccgcctggacgcagtgccagcaactgtcccagaaactgtgcaccctggcgtggagcgcccaccccctggtcggccatatggacctgcgggaggagggcgacgaggagacgaccaacgacgtgccccacatccagtgtggggacggctgcgacccccaggggctaagggacaacagccagttctgcctgcagaggatccaccagggcctcatcttctatgaaaagctcctggggagcgacatcttcaccggcgagccctccctgctgcccgacagcccagtggggcagctgcacgcctccctgctgggcctgagccagctgctgcagcccgaggggcatcactgggaaacccagcagatccccagcctcagccccagccagccctggcagcgcctgctgctccggttcaagatcctgcggtccctccaggcctttgtggccgtggccgcgagggtgttcgcccacggtgccgccaccctgagcccg

SEQ ID NO: 996 - DNA, 1515 bp, synthetic construct
  misc_feature 1..1515: note = IL23-CO16
  source 1..1515: mol_type = other DNA
atgtgccatcaacagctagtcatcagctggttctccctagtattcctcgccagccccctcgtcgccatctgggaactcaagaaggacgtctacgtcgtcgagctcgactggtacccggacgcccccggggagatggtcgttctcacctgcgacacccccgaggaggacggcatcacctggaccttagaccagagctcggaggtcctcggcagcgggaaaaccctcaccatccaggtcaaagagttcggcgacgccgggcagtacacgtgccacaagggcggggaggtcctcagccacagcctcctgctgctgcataagaaggaggacggcatctggtccaccgacatcctcaaggatcaaaaggagcccaaaaataagaccttcctgaggtgcgaggccaagaattatagcggcaggttcacctgctggtggctcacgaccatcagcaccgacctgaccttctccgtcaaaagctcccgggggagcagcgatccccagggcgttacctgcggcgccgccaccctgagcgccgagagggtcagaggggataacaaggagtatgagtactccgtcgaatgtcaggaggacagcgcctgtcccgccgccgaagagtcacttcccattgaagtgatggtcgacgccgtccacaaactgaagtacgagaactacacgtccagcttcttcatcagggacatcatcaagccggacccgcccaagaacctgcagctgaagccccttaagaatagccgacaggtggaggtgagctgggagtatcccgacacctggagcactcctcacagctacttcagcctcaccttctgcgtgcaagtgcaggggaaaagcaagcgggagaagaaggacagggtgttcactgataagaccagcgccaccgttatctgccggaagaatgccagcatcagcgtgcgcgcccaggaccgctattactccagctcctggtccgaatgggccagcgtcccctgcagcggtggcggcgggggtggtagcagggccgtgcccggtggctcctcacccgcctggacccaatgccagcagctcagccagaagctttgcaccctggcctggagcgcacaccccctggtgggccacatggacctgcgcgaagagggggacgaggaaaccaccaacgacgtgccccacatccagtgcggggacggctgtgacccccaggggctgagggacaactcccagttctgcctgcagcgaatacaccaaggcctgatcttctacgagaagctcctgggcagcgacatcttcaccggggaaccctccctgctgccggacagccccgtgggccagctccacgccagcctgctgggcctgagccagctgctgcagccggaggggcaccattgggagacgcagcagatcccgagcctgtcccccagccagccgtggcagcggctgctgctgaggttcaagatcctcaggagcctccaggccttcgtggccgtagccgcgcgggtgttcgcccacggcgcggccaccctcagtcct

SEQ ID NO: 997 - DNA, 1515 bp, synthetic construct
  misc_feature 1..1515: note = IL23-CO17
  source 1..1515: mol_type = other DNA
atgtgccaccagcagctcgtcatcagctggttcagcctcgttttcctcgccagcccgttagtcgccatctgggagcttaagaaggacgtttacgttgtcgaactcgactggtaccccgacgcccccggcgagatggtcgtcctcacctgcgatacccccgaggaagacggcatcacgtggactctcgaccagtctagcgaggtcttggggagcggcaaaaccctcaccattcaggtaaaggagttcggcgacgccggccagtacacctgccacaagggcggcgaggtcctcagccacagcctgctgctgctccataagaaagaagacggtatctggtccacggacatcctgaaggaccagaaggagcccaagaacaagaccttcctgaggtgcgaggccaagaactactccggccggtttacctgctggtggcttaccaccatcagcacggacctgaccttctccgtgaagtcctcaaggggctccagcgacccgcagggtgtgacctgcggcgcggccaccctctccgccgagcgtgtgcggggcgacaacaaggagtacgagtacagcgttgagtgtcaagaggattccgcctgccccgccgccgaagagagcctgccgatcgaggtgatggtggacgccgtgcacaaactgaagtacgagaactataccagcagcttctttatcagggacatcatcaaaccggaccctcccaagaacctgcagctgaagcccctgaagaactcccggcaggtggaggtgtcctgggagtatccggacacgtggagcaccccccactcctacttcagcctgactttctgcgtgcaggtgcagggcaagagcaagcgggagaaaaaggacagggtgttcacggacaagacctccgccacggtaatctgccggaaaaacgcctccatcagcgtgcgggcccaggacaggtactatagcagcagctggtccgagtgggccagcgtgccatgttccggagggggcggcggcggcagccgggccgtgccaggtgggagcagtcccgcctggacccaatgccagcagctgagccagaagctctgcaccctcgcctggagcgcccaccccctggtgggccacatggacctgcgcgaggagggcgatgaggagactaccaacgacgtgccccacatccaatgcggggacggctgtgacccccagggcctgagggacaacagccaattctgcctgcagcggatccatcagggtctgattttctacgagaagctgctgggcagcgacatcttcaccggggagcccagcctgctgcccgatagccccgtgggacagctgcacgccagcctgctggggctgagccaactgctgcagcccgagggccatcactgggagacacagcagatcccctcgctgagccccagccagccctggcagaggctgctcctccgcttcaagatcctgaggtcgctgcaggcgttcgtcgccgtcgcagcgcgcgtgttcgcccatggggccgccaccctgagccca

SEQ ID NO: 998 - DNA, 1515 bp, synthetic construct
  misc_feature 1..1515: note = IL23-CO18
  source 1..1515: mol_type = other DNA
atgtgccatcagcagctcgtcatcagctggtttagcctcgtcttcctcgccagccccctcgtcgcgatctgggagcttaagaaggacgtttacgtcgtcgaactcgactggtatcccgacgcccccggcgaaatggtagtcctgacctgcgacaccccggaggaggacggcatcacctggaccctcgaccagagcagcgaggtactcgggtccggcaagacactcacgatccaggtaaaggagttcggggacgcgggccagtacacttgccacaagggcggcgaggttctctcccatagcctgctcctcctgcacaagaaggaggacggaatctggagcaccgacatcctgaaggaccagaaggagccgaagaacaagaccttcctacgctgcgaggccaagaactactccggccgattcacttgctggtggctgaccaccatcagcaccgacctgaccttcagcgtgaaaagcagccgggggagctccgacccgcagggcgtgacctgcggcgccgccaccctgagcgcggaacgagtgaggggcgacaacaaggagtacgagtacagcgtggagtgccaggaggacagcgcctgtcccgccgcggaggagagtctgcccatcgaagtcatggtggacgccgtgcacaaactgaagtacgagaattacacctcaagcttcttcatcagggacatcatcaagcccgacccgcccaagaacctgcagctgaagcccctgaagaacagccgccaggtggaggtgagctgggagtaccccgacacgtggagcacccctcactcctacttcagcctgacgttctgcgtgcaggtgcagggcaagtccaagcgagagaagaaggacagggtgttcaccgataagacctccgcaacagtgatctgccggaagaacgccagcatcagcgtgagggcccaggacaggtattactccagctcctggagcgagtgggcctccgtcccctgcagcggtggcggaggcgggggcagtagggccgtacccggcggatccagcccggcctggacgcagtgccagcagctgtcccagaagctgtgtaccctggcctggtcggcccacccactggtgggccacatggacctgagggaggagggcgacgaggagacgaccaatgacgtcccccacatccagtgcggggatggctgcgacccccaggggctgagggacaattcccagttttgcctccagaggatccaccagggcctgatcttctacgagaagctcctggggagcgacatcttcacgggcgagcccagcctgctgcccgattcccccgtaggccagctgcacgccagcctgctgggcctgagccagctgctccagcccgagggccatcactgggagacacagcagatcccgagcctgagccccagccagccctggcagaggctcctgctgaggtttaagatcctgaggagcctgcaggccttcgtggccgtggccgcccgggtgttcgcccacggggcggccaccctcagcccc

SEQ ID NO: 999 - DNA, 1515 bp, synthetic construct
  misc_feature 1..1515: note = IL23-CO19
  source 1..1515: mol_type = other DNA
atgtgccaccagcagctcgttataagctggttctccctcgtcttcttggcctcacccctcgtagccatctgggagctcaagaaagacgtctacgtagtcgagctcgactggtatcccgacgccccgggagagatggtcgtcctcacctgcgatacccccgaggaggacgggataacctggaccctcgatcagtccagcgaggtcctcggcagcggcaagaccctcaccatccaggtaaaagagttcggcgacgccggccagtacacctgccacaagggcggcgaagttctctcccactccctgctgctgctccacaagaaggaggacggcatctggtccacggacatcctgaaggaccaaaaggagcccaaaaacaaaaccttcctgaggtgcgaagccaagaattattccggccggttcacctgctggtggctcacgaccatcagcacggacctgacgttcagcgtcaagagcagcaggggcagcagcgacccccagggggtgacctgcggggccgccaccctgagcgccgagagggtcaggggcgataacaaggagtatgagtacagcgtcgagtgccaggaagatagcgcctgccccgccgccgaggagagcctgcccatcgaggtgatggtggacgccgtccacaagctgaaatacgaaaactacaccagctcgttcttcatccgggatatcatcaagcccgatccccccaagaacctccagctgaaacccctgaaaaactcccggcaggtggaggtgtcgtgggagtaccccgacacctggtccaccccccactcatacttcagcctgacgttctgtgtgcaggtgcagggaaagtccaagcgggagaagaaggaccgcgtgttcacggataaaactagcgccaccgtgatctgcaggaagaacgcgagcatcagcgtgcgggcccaggataggtactactccagctcctggagcgagtgggccagcgtgccgtgttccgggggcggaggcggaggaagcagggccgtgcccggcggcagctcccccgcctggacacagtgccaacagctgagccagaagctgtgcaccctggcgtggtccgcccaccccctggtgggccacatggacctgagggaggagggcgacgaggagacaacaaacgatgtgccgcatatccagtgcggcgacgggtgcgatccccaggggctgcgggacaactcacaattctgcctgcagaggatccatcaggggctaatcttctatgagaagctcctgggtagcgacatcttcacaggcgagccctccctgctgcccgacagccccgtgggccaactgcacgcctcgttgctggggctgtcccagctgcttcagccggagggacaccattgggagacgcagcagatcccctccctgagccccagccagccctggcaacgtctcctgctgcggttcaagatcctccggtcgctgcaggcattcgtggccgtcgccgcccgggtgttcgcccacggcgccgccaccctgtcgcct

SEQ ID NO: 1000 - DNA, 1515 bp, synthetic construct
  misc_feature 1..1515: note = IL23-CO20
  source 1..1515: mol_type = other DNA
atgtgccaccagcagctcgtaatcagctggttctccctcgtctttctcgccagcccactcgtcgccatttgggagctcaagaaggacgtgtacgtcgtcgaactagattggtaccccgacgccccgggggagatggtcgtccttacctgcgacaccccagaggaggacggtatcacctggacccttgaccagagcagcgaggtcctcgggagcgggaagaccctcaccatccaggtcaaggagttcggcgacgccggccagtacacctgccacaaggggggcgaagtcctatcccacagcctgctgctcctgcacaagaaggaggatggcatctggtccaccgacatcctgaaggaccagaaagagccaaaaaataagaccttcctgcggtgtgaggccaaaaactacagcgggcggttcacctgctggtggctcacaaccatcagcaccgacctgaccttctccgtcaagagcagcagggggagcagcgatccccagggggtgacttgtggtgccgccaccctgagcgcggagagggtgaggggcgacaacaaggaatacgagtacagcgtggagtgtcaggaagactccgcctgccccgccgccgaggagtccctccccatcgaggtgatggtggacgccgtgcacaagctcaagtacgagaactacacgtccagcttcttcatccgggacatcatcaaacctgatcccccgaagaacctgcagctgaagccgctgaagaacagcaggcaagtggaggtgagctgggagtaccccgacacgtggagcaccccccacagctacttcagcctgaccttctgcgtccaggtgcagggcaagtccaagagggagaagaaggaccgcgtgtttaccgacaagacaagcgctaccgtgatctgccgaaagaacgcctccatctccgtgagggcccaggaccggtactatagcagctcatggtccgagtgggcctccgtgccatgctccggcggcggcggcggcggatctagggccgtgcccggcgggagtagccccgcgtggacccagtgccaacagctcagccagaagctctgtaccctggcctggtcagcccaccccctggtgggccacatggacctgagggaagagggagacgaggaaaccaccaacgacgtgccccacatccagtgcggcgacggctgcgacccccagggcctccgggacaacagccagttctgtctgcagaggatccaccaggggctgatcttctatgaaaagctgctgggctccgacatcttcaccggggagcccagcctgctgcccgatagccccgtgggccagctgcacgcctccttgctgggcctgtcgcaactgctgcagcccgagggtcaccactgggagactcagcagatcccgagcctgtcccccagccagccctggcaaaggctgctgctgaggttcaagatcctccggtcactgcaggccttcgtggccgtggccgccagggtgttcgcccacggtgccgcgacgctgagcccc

SEQ ID NO: 1001 - DNA, 1515 bp, synthetic construct
  misc_feature 1..1515: note = IL23-CO21
  source 1..1515: mol_type = other DNA
atgtgtcaccagcaactcgttatctcctggttcagcttggtcttcctcgccagccccctcgtcgccatctgggagctcaagaaggacgtctacgtcgtcgagcttgactggtaccccgacgcccccggcgagatggttgtcctcacgtgcgacacccccgaggaggacgggatcacctggaccttggaccaaagcagcgaggttctcggcagcggcaagaccctcaccatccaggtcaaggagttcggagacgccggccagtatacctgccacaagggcggggaggtcctcagccacagcctgctcctgctgcacaagaaagaggatgggatatggtccacagacatcctgaaggatcagaaggagccaaagaataagaccttcctccgctgtgaggccaagaactactctggccgcttcacctgctggtggctgaccaccatctccaccgacctcaccttcagcgtcaagagcagccgggggagctccgaccctcaaggagtgacctgcggcgccgccaccctgagcgccgaaagggtgcggggcgacaacaaggagtacgagtacagcgtggagtgccaagaggactccgcgtgccccgccgccgaagagagcctgcccatcgaggtgatggtggacgccgtccacaagctgaagtacgagaactacaccagcagctttttcatccgagatatcatcaagcccgaccctcccaagaacctgcagctgaagcccctgaagaacagcaggcaggtggaggtttcctgggaataccctgacacctggtccaccccccactcctacttcagcctgacgttctgtgtgcaggttcagggtaaaagcaaaagggaaaagaaggacagggtgttcacggacaagacgagcgccaccgtgatctgtcgaaagaacgcttcgatcagcgtgagggcccaagataggtactacagcagcagctggtccgaatgggcctccgtgccctgcagcgggggcggcggcggaggaagccgcgccgtgccaggtggcagctcgcccgcctggacccaatgccagcaactgagccagaaactgtgtaccctggcctggtccgcccaccccctggtgggccatatggacctgagggaggagggcgacgaggagacgaccaacgacgtgccgcacatccagtgtggggacggctgcgacccccagggcctgcgggacaacagccagttctgcctgcagaggatccaccaggggctcattttctacgagaagctgttgggcagcgacatattcacgggggaaccctcgctgctccccgatagccccgtcggccagctgcacgccagcctgctggggctgagccagctgctgcagccggaggggcaccactgggagacacagcagatcccgagcctgagcccgagccagccctggcagaggctgctgcttaggttcaagatcctgcggtccctgcaggccttcgtggccgtggccgcccgggtgttcgcccacggcgccgccaccctgtcaccg

SEQ ID NO: 1002 - DNA, 1515 bp, synthetic construct
  misc_feature 1..1515: note = IL23-CO22
  source 1..1515: mol_type = other DNA
atgtgccaccaacagctcgtcatctcgtggttctccctcgtattcctcgcgtcccccctcgtcgcgatctgggagctcaaaaaagacgtgtacgtggttgagctcgactggtaccccgacgcccccggagagatggtcgtcctcacctgcgacacccccgaggaggacggcatcacctggaccctcgaccagagcagcgaggtcttagggagcggcaagaccctcaccatccaggtcaaagagttcggcgacgccggacagtacacctgccacaaagggggcgaggtcctcagccacagcctgctgctcctgcataagaaagaggacggcatttggagcacggacatcctcaaggaccagaaggagcccaagaataagacgttcctgaggtgcgaggccaagaattacagcgggaggttcacctgctggtggctgaccaccatctccaccgacctgaccttcagcgtgaagtcgagcaggggcagcagcgatccccagggcgtgacctgcggggccgccaccctgagcgccgagcgcgtgaggggagacaacaaggaatacgagtacagcgtggaatgccaggaggacagcgcctgccccgcggctgaggagagcctcccgatcgaggttatggtggatgcggtgcacaagctgaagtacgagaactacacctccagcttcttcatcagggacatcatcaagcccgatccgcccaagaatctgcagctcaagcccctgaagaactcgcggcaggtggaggtgagctgggaataccccgacacctggagcaccccccactcgtatttcagcttaaccttctgcgtgcaggtacagggaaaatccaagagggagaagaaggacagggtcttcaccgacaagaccagcgccaccgtgatctgccggaagaatgccagcattagcgtgagggcgcaggacaggtactactccagcagctggtcggagtgggcctcagtgccctgcagcggcgggggcggcggcggcagcagggccgtcccaggcggctccagccccgcatggactcaatgccagcagctgtcccagaaactctgtaccctggcgtggtccgcccatcccctggtgggccacatggatctcagggaggagggggacgaggagactaccaacgacgtgccccacatccagtgcggcgacggctgcgacccccagggcctgagggataacagccagttctgtctgcaaaggatccaccaaggactgatcttctacgaaaaactgctgggctccgacatcttcaccggcgagcccagcctgctgcccgactcacccgtgggccagctgcatgccagcctgctcggcctgagccagctgctgcagccggaggggcaccactgggagacgcagcaaatccccagcctcagtcccagccagccatggcagaggctgctgctgaggttcaaaatcctcaggtcgctgcaggccttcgtggcagtggccgcgcgggtcttcgcccatggggcagcgaccctgtccccc

SEQ ID NO: 1003 - DNA, 1515 bp, synthetic construct
  misc_feature 1..1515: note = IL23-CO23
  source 1..1515: mol_type = other DNA
atgtgccaccagcagttggtcatcagctggtttagcctcgtctttctcgcctccccccttgtcgccatctgggagctcaagaaggacgtctacgttgtcgagctcgactggtacccggacgcccccggcgagatggtcgtcctcacctgcgacacccccgaggaggacggcatcacctggacgctcgaccagtccagcgaggtcctcgggagcggtaagacactaaccattcaggtcaaggagttcggggacgccggccagtacacctgccacaaggggggagaggtactcagccacagcctgctgctgctgcacaaaaaggaggacggcatctggagcaccgatatcctgaaggaccagaaggagcccaagaacaagaccttcctgcggtgcgaggcaaagaactacagcggcaggttcacctgctggtggctcacaaccattagcaccgacctgaccttcagcgtcaaaagctcccggggcagctccgacccgcagggcgtgacctgtggcgcggcaacgctgagcgccgagcgtgtgaggggcgacaacaaggagtacgagtactccgtggagtgccaggaggactccgcttgtcccgccgcggaggagagcctgcccatcgaagtgatggtggacgccgtgcataagctgaaatacgagaactacaccagctcctttttcatccgcgacatcatcaaacctgacccgcccaaaaacctgcagctgaagcccctcaagaacagcaggcaagtggaggtcagctgggaatacccagacacctggagcacaccccactcctactttagcctgaccttttgtgtgcaggtgcagggcaagtcgaagagggagaaaaaggatcgtgtgttcaccgacaagacctccgccaccgtgatctgccgcaagaacgccagcatcagcgtgcgggcccaggacaggtactacagctccagctggtcagaatgggccagcgtgccctgtagcggcggcggcggaggcggcagccgtgcagttccggggggcagcagccccgcctggacccagtgccagcagctgagccagaagctgtgcactctggcatggtccgcccaccccctggtgggccacatggacctgcgagaggagggcgacgaggagactaccaacgacgtgccccacatccagtgcggggacggctgcgacccccaggggctgcgcgacaacagccagttctgcctgcagaggatacaccagggactcatattttacgagaagctcctggggagcgacatcttcaccggcgagccgagcctcctgccggactcgcccgttggccagctgcatgccagcctcctggggctgtcccaactcctccagcccgagggccaccattgggaaacccagcagatccccagcctgagccccagccagccctggcagaggctgctgctgaggttcaaaatcctgcgaagcctccaggctttcgtggccgtggccgccagggtgttcgcccacggggccgccaccctgtccccc

SEQ ID NO: 1004 - DNA, 1515 bp, synthetic construct
  misc_feature 1..1515: note = IL23-CO24
  source 1..1515: mol_type = other DNA
atgtgccatcagcaactcgtcatcagctggttcagcctcgtcttcctcgccagcccgctcgtcgccatctgggagctcaagaaagacgtctacgtcgtcgagctcgactggtatcccgacgcccccggggagatggtcgtcttaacctgcgatacccccgaagaggacgggatcacctggaccctcgaccaaagcagcgaggtactcggcagcggcaagaccctcaccatccaggtcaaagagttcggggacgccgggcagtacacctgccacaagggcggggaggttctctcccacagcctgctcctgctgcacaagaaggaagacggcatctggtccaccgacatcctaaaggaccagaaggagcccaagaacaagaccttcctgaggtgcgaggccaagaactacagcggccggttcacctgctggtggctcacgaccatcagcaccgacctcaccttcagcgtgaaaagctcgaggggcagcagcgacccccagggcgtgacctgcggcgccgccaccctgagcgcggagagggtgaggggcgacaacaaggagtacgagtactccgtggagtgccaggaggacagcgcctgccccgccgccgaggaatccctgcccatcgaggtaatggtggacgccgtgcacaagctgaaatacgagaactacaccagctcctttttcatccgcgacatcatcaagcccgaccccccaaagaacctgcagctgaagccactgaagaacagccggcaggtggaggtttcgtgggagtacccagacacctggagcaccccgcacagctacttcagcctgaccttttgcgtccaggtgcagggtaagtccaaaagggagaaaaaggaccgggttttcaccgacaagaccagcgccaccgtgatctgcaggaagaacgccagcatctccgtgagagcccaggacaggtactatagctcctcctggagcgagtgggcgagcgtgccatgctcgggcggcggcgggggaggttcgcgcgccgttcccggtggcagcagtccggcctggacccagtgccaacagctgtcccagaagctttgcactctcgcatggtccgcccaccccctggtgggccacatggacctccgggaggagggcgatgaggaaaccaccaacgatgtgccccacatccagtgcggcgacggatgcgacccccagggtctgcgggacaacagccagttctgcctccagcgcatacaccaaggcctgatcttctatgagaagctcctgggatccgacatcttcaccggcgagccctcgctcctgccggacagcccggtgggccagctgcacgcctccctcctgggactcagccagctgctgcagcccgagggccaccactgggagacgcagcagatccccagcctgagccccagccagccctggcaaaggctgctgctgaggttcaaaatcctcaggtccttgcaggccttcgtggccgtggccgcgcgagtgttcgcccacggggccgccaccctcagcccc

SEQ ID NO: 1005 - DNA, 1515 bp, synthetic construct
  misc_feature 1..1515: note = IL23-CO25
  source 1..1515: mol_type = other DNA
atgtgccaccagcagctcgtcatcagctggttctccctcgtcttcctagccagccccttggtcgcaatctgggagcttaagaaggacgtctacgttgtcgagctggactggtaccccgacgcccccggcgagatggtcgttcttacctgcgacacccccgaggaggacgggatcacctggaccctcgatcagagcagcgaggtcctcggcagcggcaagaccttgaccatccaggtcaaggaattcggcgacgccggccagtacacgtgccacaaggggggcgaggtactctcgcattcgctgctactgctccacaagaaggaggacgggatctggagcaccgacatcctaaaggaccagaaggagcccaagaacaagaccttcctgcggtgcgaagccaagaactacagcgggcggtttacctgctggtggctgaccaccattagcaccgacctgaccttctccgtgaaaagctcaaggggcagcagcgacccccagggcgtcacctgcggcgccgccaccctcagcgccgagagggtgaggggtgataacaaggagtacgagtactccgtggaatgccaagaggacagcgcctgccccgccgccgaggaatccctccccatcgaggtcatggtggatgctgtgcacaagctcaagtacgagaactacaccagcagcttcttcatccgagacatcatcaagccggatccccccaagaacctgcagctgaagcccctgaaaaacagccggcaggtggaggtgagttgggagtaccccgacacctggagcacgccccacagctatttcagcctgacgttctgcgtgcaggtgcagggcaagtctaagagggagaaaaaagacagggtgttcaccgataagaccagcgccaccgtgatctgccgtaagaacgccagcatcagcgtgagggcccaggaccggtactactccagctcgtggagcgagtgggctagcgttccatgcagcggaggcggcggcgggggatcaagagccgtgcccggggggtcctcccccgcctggacccaatgtcagcagctgtcccagaagctgtgtacgctggcatggagcgcccacccccttgtcgggcacatggatctgcgggaggagggggacgaggaaaccaccaacgacgttccccatatccagtgcggggacggctgcgacccccagggcctccgggacaacagccaattctgcctgcaaaggatccaccagggcctgatcttctacgagaagctgctgggcagcgacatcttcacgggcgagcctagcctgctcccggactcccctgtgggccaactgcacgccagcctgctcgggctgagccagttgctgcagccggagggccaccactgggagactcaacagatcccctccctgagccccagccagccctggcagaggctgctgctccgctttaagatcctgcggagcttgcaggcctttgtggcagtggccgcgcgcgtgttcgcccacggcgcagccaccctgtcaccc

SEQ ID NO: 1006 - protein, 5 aa, synthetic construct
  REGION 1..5: note = Linker
GGGGS

SEQ ID NO: 1007 - protein, 10 aa, synthetic construct
  REGION 1..10: note = Linker
GGSGGGGSGG

SEQ ID NO: 1008 - protein, 8 aa, synthetic construct
  REGION 1..8: note = Linker
GGSGGGGG

SEQ ID NO: 1009 - protein, 8 aa, synthetic construct
  REGION 1..8: note = Linker
GSGSGSGS

SEQ ID NO: 1010 - protein, 27 aa, synthetic construct
  VARIANT 6..10: note = grouped residues may be present or absent
  VARIANT 11..15: note = grouped residues may be present or absent
  VARIANT 16..20: note = grouped residues may be present or absent
  VARIANT 21..25: note = grouped residues may be present or absent
GGGGGGGGGGGGGGGGGGGGGGGGGGS

SEQ ID NO: 1011 - protein, 5 aa, synthetic construct
  REGION 1..5: note = Linker
GGGGG

SEQ ID NO: 1012 - protein, 6 aa, synthetic construct
  REGION 1..6: note = Linker
GGGGGG

SEQ ID NO: 1013 - protein, 7 aa, synthetic construct
  REGION 1..7: note = Linker
GGGGGGG

SEQ ID NO: 1014 - protein, 8 aa, synthetic construct
  REGION 1..8: note = Linker
GGGGGGGG

SEQ ID NO: 1015 - protein, 5 aa, synthetic construct
  REGION 1..5: note = Linker
EAAAK

SEQ ID NO: 1016 - protein, 15 aa, synthetic construct
  REGION 1..15: note = Linker
EAAAKEAAAKEAAAK

SEQ ID NO: 1017 - protein, 16 aa, synthetic construct
  REGION 1..16: note = Linker
GGGGSLVPRGSGGGGS

SEQ ID NO: 1018 - protein, 6 aa, synthetic construct
  REGION 1..6: note = Linker
GSGSGS

SEQ ID NO: 1019 - protein, 35 aa, synthetic construct
  VARIANT 6..10: note = grouped residues may be present or absent
  VARIANT 11..15: note = grouped residues may be present or absent
  VARIANT 16..20: note = grouped residues may be present or absent
  VARIANT 21..25: note = grouped residues may be present or absent
GGGGSGGGGSGGGGSGGGGSGGGGSLVPRGSGGGG

SEQ ID NO: 1020 - protein, 11 aa, synthetic construct
  REGION 1..11: note = Linker
GGSGGHMGSGG

SEQ ID NO: 1021 - protein, 11 aa, synthetic construct
  REGION 1..11: note = Linker
GGSGGSGGSGG

SEQ ID NO: 1022 - protein, 5 aa, synthetic construct
  REGION 1..5: note = Linker
GGSGG

SEQ ID NO: 1023 - protein, 8 aa, synthetic construct
  REGION 1..8: note = Linker
GSGSGSGS

SEQ ID NO: 1024 - protein, 18 aa, synthetic construct
  REGION 1..18: note = Linker
GGGSEGGGSEGGGSEGGG

SEQ ID NO: 1025 - skipped

SEQ ID NO: 1026 - protein, 5 aa, synthetic construct
  REGION 1..5: note = Linker
GGSSG

SEQ ID NO: 1027 - protein, 11 aa, synthetic construct
  REGION 1..11: note = Linker
GSGGGTGGGSG

SEQ ID NO: 1028 - protein, 12 aa, synthetic construct
  REGION 1..12: note = Linker
GSGSGSGSGGSG

SEQ ID NO: 1029 - protein, 14 aa, synthetic construct
  REGION 1..14: note = Linker
GSGGSGSGGSGGSG

SEQ ID NO: 1030 - protein, 14 aa, synthetic construct
  REGION 1..14: note = Linker
GSGGSGGSGGSGGS

SEQ ID NO: 1031 - protein, 306 aa, Homo sapiens
IWELKKDVYVVELDWYPDAPGEMVVLTCDTPEEDGITWTLDQSSEVLGSGKTLTIQVKEFGDAGQYTCHKGGEVLSHSLLLLHKKEDGIWSTDILKDQKEPKNKTFLRCEAKNYSGRFTCWWLTTISTDLTFSVKSSRGSSDPQGVTCGAATLSAERVRGDNKEYEYSVECQEDSACPAAEESLPIEVMVDAVHKLKYENYTSSFFIRDIIKPDPPKNLQLKPLKNSRQVEVSWEYPDTWSTPHSYFSLTFCVQVQGKSKREKKDRVFTDKTSATVICRKNASISVRAQDRYYSSSWSEWASVPCS

SEQ ID NO: 1032 - DNA, 918 bp, Homo sapiens
  source 1..918: mol_type = other DNA
atatgggaactgaagaaagatgtttatgtcgtagaattggattggtatccggatgcccctggagaaatggtggtcctcacctgtgacacccctgaagaagatggtatcacctggaccttggaccagagcagtgaggtcttaggctctggcaaaaccctgaccatccaagtcaaagagtttggagatgctggccagtacacctgtcacaaaggaggcgaggttctaagccattcgctcctgctgcttcacaaaaaggaagatggaatttggtccactgatattttaaaggaccagaaagaacccaaaaataagacctttctaagatgcgaggccaagaattattctggacgtttcacctgctggtggctgacgacaatcagtactgatttgacattcagtgtcaaaagcagcagaggctcttctgacccccaaggggtgacgtgcggagctgctacactctctgcagagagagtcagaggggacaacaaggagtatgagtactcagtggagtgccaggaggacagtgcctgcccagctgctgaggagagtctgcccattgaggtcatggtggatgccgttcacaagctcaagtatgaaaactacaccagcagcttcttcatcagggacatcatcaaacctgacccacccaagaacttgcagctgaagccattaaagaattctcggcaggtggaggtcagctgggagtaccctgacacctggagtactccacattcctacttctccctgacattctgcgttcaggtccagggcaagagcaagagagaaaagaaagatagagtcttcacggacaagacctcagccacggtcatctgccgcaaaaatgccagcattagcgtgcgggcccaggaccgctactatagctcatcttggagcgaatgggcatctgtgccctgcagt

SEQ ID NO: 1033 - protein, 197 aa, Homo sapiens
RNLPVATPDPGMFPCLHHSQNLLRAVSNMLQKARQTLEFYPCTSEEIDHEDITKDKTSTVEACLPLELTKNESCLNSRETSFITNGSCLASRKTSFMMALCLSSIYEDLKMYQVEFKTMNAKLLMDPKRQIFLDQNMLAVIDELMQALNFNSETVPQKSSLEEPDFYKTKIKLCILLHAFRIRAVTIDRVMSYLNAS

SEQ ID NO: 1034 - DNA, 591 bp, Homo sapiens
  source 1..591: mol_type = other DNA
agaaacctccccgtggccactccagacccaggaatgttcccatgccttcaccactcccaaaacctgctgagggccgtcagcaacatgctccagaaggccagacaaactctagaattttacccttgcacttctgaagagattgatcatgaagatatcacaaaagataaaaccagcacagtggaggcctgtttaccattggaattaaccaagaatgagagttgcctaaattccagagagacctctttcataactaatgggagttgcctggcctccagaaagacctcttttatgatggccctgtgccttagtagtatttatgaagacttgaagatgtaccaggtggagttcaagaccatgaatgcaaagcttctgatggatcctaagaggcagatctttctagatcaaaacatgctggcagttattgatgagctgatgcaggccctgaatttcaacagtgagactgtgccacaaaaatcctcccttgaagaaccggatttttataaaactaaaatcaagctctgcatacttcttcatgctttcagaattcgggcagtgactattgatagagtgatgagctatctgaatgcttcc

SEQ ID NO: 1035 - protein, 22 aa, Homo sapiens
MCHQQLVISWFSLVFLASPLVA

SEQ ID NO: 1036 - DNA, 66 bp, Homo sapiens
  source 1..66: mol_type = other DNA
atgtgtcaccagcagttggtcatctcttggttttccctggtttttctggcatctcccctcgtggcc

SEQ ID NO: 1037 - DNA, 1596 bp, synthetic construct; identical to SEQ ID NO: 810
  misc_feature 1..1596: note = hIL12AB_001
  source 1..1596: mol_type = other DNA

SEQ ID NO: 1038 - DNA, 1596 bp, synthetic construct; identical to SEQ ID NO: 811
  misc_feature 1..1596: note = hIL12AB_002
  source 1..1596: mol_type = other DNA

SEQ ID NO: 1039 - DNA, 1596 bp, synthetic construct; identical to SEQ ID NO: 812
  misc_feature 1..1596: note = hIL12AB_003
  source 1..1596: mol_type = other DNA

SEQ ID NO: 1040 - DNA, 1599 bp, synthetic construct; identical to SEQ ID NO: 813
  misc_feature 1..1599: note = hIL12AB_004
  source 1..1599: mol_type = other DNA

SEQ ID NO: 1041 - DNA, 1596 bp, synthetic construct; identical to SEQ ID NO: 814
  misc_feature 1..1596: note = hIL12AB_005
  source 1..1596: mol_type = other DNA

SEQ ID NO: 1042 - DNA, 1596 bp, synthetic construct; identical to SEQ ID NO: 815
  misc_feature 1..1596: note = hIL12AB_006
  source 1..1596: mol_type = other DNA

SEQ ID NO: 1043 - DNA, 1596 bp, synthetic construct; identical to SEQ ID NO: 816
  misc_feature 1..1596: note = hIL12AB_007
  source 1..1596: mol_type = other DNA

SEQ ID NO: 1044 - DNA, 1596 bp, synthetic construct; identical to SEQ ID NO: 817
  misc_feature 1..1596: note = hIL12AB_008
  source 1..1596: mol_type = other DNA

SEQ ID NO: 1045 - DNA, 1596 bp, synthetic construct; identical to SEQ ID NO: 818
  misc_feature 1..1596: note = hIL12AB_009
  source 1..1596: mol_type = other DNA

SEQ ID NO: 1046 - DNA, 1596 bp, synthetic construct; identical to SEQ ID NO: 819
  misc_feature 1..1596: note = hIL12AB_010
  source 1..1596: mol_type = other DNA

SEQ ID NO: 1047 - DNA, 1596 bp, synthetic construct; identical to SEQ ID NO: 820
  misc_feature 1..1596: note = hIL12AB_011
  source 1..1596: mol_type = other DNA

SEQ ID NO: 1048 - DNA, 1596 bp, synthetic construct; identical to SEQ ID NO: 821
  misc_feature 1..1596: note = hIL12AB_012
  source 1..1596: mol_type = other DNA

SEQ ID NO: 1049 - DNA, 1596 bp, synthetic construct; identical to SEQ ID NO: 822
  misc_feature 1..1596: note = hIL12AB_013
  source 1..1596: mol_type = other DNA

SEQ ID NO: 1050 - DNA, 1596 bp, synthetic construct; identical to SEQ ID NO: 823
  misc_feature 1..1596: note = hIL12AB_014
  source 1..1596: mol_type = other DNA

SEQ ID NO: 1051 - DNA, 1596 bp, synthetic construct; identical to SEQ ID NO: 824
  misc_feature 1..1596: note = hIL12AB_015
  source 1..1596: mol_type = other DNA

SEQ ID NO: 1052 - DNA, 1596 bp, synthetic construct; identical to SEQ ID NO: 825
  misc_feature 1..1596: note = hIL12AB_016
  source 1..1596: mol_type = other DNA

SEQ ID NO: 1053 - DNA, 1596 bp, synthetic construct; identical to SEQ ID NO: 826
  misc_feature 1..1596: note = hIL12AB_017
  source 1..1596: mol_type = other DNA

SEQ ID NO: 1054 - DNA, 1596 bp, synthetic construct; identical to SEQ ID NO: 827
  misc_feature 1..1596: note = hIL12AB_018
  source 1..1596: mol_type = other DNA

SEQ ID NO: 1055 - DNA, 1596 bp, synthetic construct; identical to SEQ ID NO: 828
  misc_feature 1..1596: note = hIL12AB_019
  source 1..1596: mol_type = other DNA

SEQ ID NO: 1056 - DNA, 1596 bp, synthetic construct; identical to SEQ ID NO: 829
  misc_feature 1..1596: note = hIL12AB_020
  source 1..1596: mol_type = other DNA

SEQ ID NO: 1057 - DNA, 1596 bp, synthetic construct; identical to SEQ ID NO: 830
  misc_feature 1..1596: note = hIL12AB_021
  source 1..1596: mol_type = other DNA

SEQ ID NO: 1058 - DNA, 1596 bp, synthetic construct; identical to SEQ ID NO: 831
  misc_feature 1..1596: note = hIL12AB_022
  source 1..1596: mol_type = other DNA

SEQ ID NO: 1059 - DNA, 1596 bp, synthetic construct; identical to SEQ ID NO: 832
  misc_feature 1..1596: note = hIL12AB_023
  source 1..1596: mol_type = other DNA

SEQ ID NO: 1060 - DNA, 1596 bp, synthetic construct; identical to SEQ ID NO: 833
  misc_feature 1..1596: note = hIL12AB_024
  source 1..1596: mol_type = other DNA

SEQ ID NO: 1061 - DNA, 1596 bp, synthetic construct; identical to SEQ ID NO: 834
  misc_feature 1..1596: note = hIL12AB_025
  source 1..1596: mol_type = other DNA

SEQ ID NO: 1062 - DNA, 1596 bp, synthetic construct; identical to SEQ ID NO: 835
  misc_feature 1..1596: note = hIL12AB_026
  source 1..1596: mol_type = other DNA

SEQ ID NO: 1063 - DNA, 1596 bp, synthetic construct; identical to SEQ ID NO: 836
  misc_feature 1..1596: note = hIL12AB_027
  source 1..1596: mol_type = other DNA

SEQ ID NO: 1064 - DNA, 1596 bp, synthetic construct; identical to SEQ ID NO: 837
  misc_feature 1..1596: note = hIL12AB_028
  source 1..1596: mol_type = other DNA

SEQ ID NO: 1065 - DNA, 1596 bp, synthetic construct; identical to SEQ ID NO: 838
  misc_feature 1..1596: note = hIL12AB_029
  source 1..1596: mol_type = other DNA

SEQ ID NO: 1066 - DNA, 1596 bp, synthetic construct; identical to SEQ ID NO: 839
  misc_feature 1..1596: note = hIL12AB_030
  source 1..1596: mol_type = other DNA

SEQ ID NO: 1067 - DNA, 1596 bp, synthetic construct; identical to SEQ ID NO: 840
  misc_feature 1..1596: note = hIL12AB_031
  source 1..1596: mol_type = other DNA

SEQ ID NO: 1068 - DNA, 1596 bp, synthetic construct; identical to SEQ ID NO: 841
  misc_feature 1..1596: note = hIL12AB_032
  source 1..1596: mol_type = other DNA

SEQ ID NO: 1069 - DNA, 1596 bp, synthetic construct; identical to SEQ ID NO: 842
  misc_feature 1..1596: note = hIL12AB_033
  source 1..1596: mol_type = other DNA

SEQ ID NO: 1070 - DNA, 1596 bp, synthetic construct; identical to SEQ ID NO: 843
  misc_feature 1..1596: note = hIL12AB_034
  source 1..1596: mol_type = other DNA

SEQ ID NO: 1071 - DNA, 1596 bp, synthetic construct; identical to SEQ ID NO: 844
  misc_feature 1..1596: note = hIL12AB_035
  source 1..1596: mol_type = other DNA

SEQ ID NO: 1072 - DNA, 1596 bp, synthetic construct; identical to SEQ ID NO: 845
  misc_feature 1..1596: note = hIL12AB_036
  source 1..1596: mol_type = other DNA

SEQ ID NO: 1073 - DNA, 1596 bp, synthetic construct; identical to SEQ ID NO: 846
  misc_feature 1..1596: note = hIL12AB_037
  source 1..1596: mol_type = other DNA

SEQ ID NO: 1074 - DNA, 1596 bp, synthetic construct; identical to SEQ ID NO: 847
  misc_feature 1..1596: note = hIL12AB_038
  source 1..1596: mol_type = other DNA

SEQ ID NO: 1075 - DNA, 1596 bp, synthetic construct; identical to SEQ ID NO: 848
  misc_feature 1..1596: note = hIL12AB_039
  source 1..1596: mol_type = other DNA

SEQ ID NO: 1076 - DNA, 1596 bp, synthetic construct; identical to SEQ ID NO: 849
  misc_feature 1..1596: note = hIL12AB_040
  source 1..1596: mol_type = other DNA

SEQ ID NO: 1077 - DNA, 1829 bp, synthetic construct
  misc_feature 1..1829: note = hIL12AB_001
  source 1..1829: mol_type = other DNA
tcaagcttttggaccctcgtacagaagctaatacgactcactatagggaaataagagagaaaagaagagtaagaagaaatataagagccaccatgtgtcaccagcagctggtcattagctggtttagccttgtgttcctggcctccccccttgtcgctatttgggagctcaagaaggacgtgtacgtggtggagttggattggtacccagacgcgcccggagagatggtagttctgacctgtgataccccagaggaggacggcatcacctggacgctggaccaaagcagcgaggttttgggctcagggaaaacgctgaccatccaggtgaaggaattcggcgacgccgggcagtacacctgccataagggaggagaggtgctgagccattcccttcttctgctgcacaagaaagaggacggcatctggtctaccgacatcctgaaagaccagaaggagcccaagaacaaaaccttcctgaggtgcgaggccaagaactactccggcaggttcacttgttggtggctgaccaccatcagtacagacctgacttttagtgtaaaaagctccagaggctcgtccgatccccaaggggtgacctgcggcgcagccactctgagcgctgagcgcgtgcgcggtgacaataaagagtacgagtacagcgttgagtgtcaagaagatagcgcttgccctgccgccgaggagagcctgcctatcgaggtgatggttgacgcagtgcacaagcttaagtacgagaattacaccagctcattcttcattagagatataatcaagcctgacccacccaagaacctgcagctgaagccactgaaaaactcacggcaggtcgaagtgagctgggagtaccccgacacctggagcactcctcattcctatttctctcttacattctgcgtccaggtgcagggcaagagcaagcgggaaaagaaggatcgagtcttcaccgacaaaacaagcgcgaccgtgatttgcaggaagaacgccagcatctccgtcagagcccaggatagatactatagtagcagctggagcgagtgggcaagcgtgccctgttccggcggcgggggcgggggcagccgaaacttgcctgtcgctaccccggaccctggaatgtttccgtgtctgcaccacagccagaacctgctgagagccgtgtcgaatatgctccagaaggcccggcagacccttgagttctacccctgtaccagcgaagagatcgatcatgaagatatcacgaaagataaaacatccaccgtcgaggcttgtctcccgctggagctgaccaagaacgagagctgtctgaatagccgggagacgtctttcatcacgaatggtagctgtctggccagcaggaaaacttccttcatgatggctctctgcctgagctctatctatgaagatctgaagatgtatcaggtggagtttaaaacaatgaacgccaaactcctgatggacccaaaaaggcaaatctttctggaccagaatatgctggccgtgatagacgagctgatgcaggcactgaacttcaacagcgagacggtgccacagaaatccagcctggaggagcctgacttttacaaaactaagatcaagctgtgtatcctgctgcacgcctttagaatccgtgccgtgactatcgacagggtgatgtcatacctcaacgcttcatgataataggctggagcctcggtggccatgcttcttgccccttgggcctccccccagcccctcctccccttcctgcacccgtaccccccaaacaccattgtcacactccagtggtctttgaataaagtctgagtgggcggc

SEQ ID NO: 1078 - DNA, 1829 bp, synthetic construct
  misc_feature 1..1829: note = hIL12AB_002
  source 1..1829: mol_type = other DNA
tcaagcttttggaccctcgtacagaagctaatacgactcactatagggaaataagagagaaaagaagagtaagaagaaatataagagccaccatgtgccaccagcagctggtgatcagctggttcagcctggtgttcctggccagccccctggtggccatctgggagctgaagaaggacgtgtacgtggtggagttggattggtaccccgacgcccccggcgagatggtggtgctgacctgcgacacccccgaggaggacggcatcacctggaccctggaccagagcagcgaggtgctgggcagcggcaagaccctgaccatccaggtgaaggagttcggcgacgccggccagtacacctgccacaagggcggcgaggtgctgagccacagcctgctgctgctgcacaagaaggaggacggcatctggagcaccgacatcctgaaggaccagaaggagcccaagaacaagaccttcctgagatgcgaggccaagaactacagcggcagattcacctgctggtggctgaccaccatcagcaccgacctgaccttcagcgtgaagagcagcagaggcagcagcgacccccagggcgtgacctgcggcgccgccaccctgagcgccgagagagtgagaggcgacaacaaggagtacgagtacagcgtggagtgccaggaagatagcgcctgccccgccgccgaggagagcctgcccatcgaggtgatggtggacgccgtgcacaagctgaagtacgagaactacaccagcagcttcttcatcagagatatcatcaagcccgacccccccaagaacctgcagctgaagcccctgaagaacagccggcaggtggaggtgagctgggagtaccccgacacctggagcaccccccacagctacttcagcctgaccttctgcgtgcaggtgcagggcaagagcaagagagagaagaaagatagagtgttcaccgacaagaccagcgccaccgtgatctgcagaaagaacgccagcatcagcgtgagagcccaagatagatactacagcagcagctggagcgagtgggccagcgtgccctgcagcggcggcggcggcggcggcagcagaaacctgcccgtggccacccccgaccccggcatgttcccctgcctgcaccacagccagaacctgctgagagccgtgagcaacatgctgcagaaggcccggcagaccctggagttctacccctgcaccagcgaggagatcgaccacgaagatatcaccaaagataagaccagcaccgtggaggcctgcctgcccctggagctgaccaagaacgagagctgcctgaacagcagagagaccagcttcatcaccaacggcagctgcctggccagcagaaagaccagcttcatgatggccctgtgcctgagcagcatctacgaggacctgaagatgtaccaggtggagttcaagaccatgaacgccaagctgctgatggaccccaagcggcagatcttcctggaccagaacatgctggccgtgatcgacgagctgatgcaggccctgaacttcaacagcgagaccgtgccccagaagagcagcctggaggagcccgacttctacaagaccaagatcaagctgtgcatcctgctgcacgccttcagaatcagagccgtgaccatcgacagagtgatgagctacctgaacgccagctgataataggctggagcctcggtggccatgcttcttgccccttgggcctccccccagcccctcctccccttcctgcacccgtaccccccaaacaccattgtcacactccagtggtctttgaataaagtctgagtgggcggc

SEQ ID NO: 1079 - DNA, 1829 bp, synthetic construct
  misc_feature 1..1829: note = hIL12AB_003
  source 1..1829: mol_type = other DNA
tcaagcttttggaccctcgtacagaagctaatacgactcactatagggaaataagagagaaaagaagagtaagaagaaatataagagccaccatgtgtcaccagcagttggtcatctcttggttttccctggtttttctggcatctcccctcgtggccatctgggaactgaagaaagacgtttacgttgtagaattggattggtatccggacgctcctggagaaatggtggtcctcacctgtgacacccctgaagaagacggaatcacctggaccttggaccagagcagtgaggtcttaggctctggcaaaaccctgaccatccaagtcaaagagtttggagatgctggccagtacacctgtcacaaaggaggcgaggttctaagccattcgctcctgctgcttcacaaaaaggaagatggaatttggtccactgatattttaaaggaccagaaagaacccaaaaataagacctttctaagatgcgaggccaagaattattctggacgtttcacctgctggtggctgacgacaatcagtactgatttgacattcagtgtcaaaagcagcagaggctcttctgacccccaaggggtgacgtgcggagctgctacactctctgcagagagagtcagaggtgacaacaaggagtatgagtactcagtggagtgccaggaagatagtgcctgcccagctgctgaggagagtctgcccattgaggtcatggtggatgccgttcacaagctcaagtatgaaaactacaccagcagcttcttcatcagagatatcatcaaacctgacccacccaagaacttgcagctgaagccattaaagaattctcggcaggtggaggtcagctgggagtaccctgacacctggagtactccacattcctacttctccctgacattctgcgttcaggtccagggcaagagcaagagagaaaagaaagatagagtcttcacagataagacctcagccacggtcatctgccgcaaaaatgccagcattagcgtgcgggcccaggaccgctactatagctcatcttggagcgaatgggcatctgtgccctgcagtggcggagggggcggagggagcagaaacctccccgtggccactccagacccaggaatgttcccatgccttcaccactcccaaaacctgctgagggccgtcagcaacatgctccagaaggcccggcaaactttagaattttacccttgcacttctgaagagattgatcatgaagatatcacaaaagataaaaccagcacagtggaggcctgtttaccattggaattaaccaagaatgagagttgcctaaattccagagagacctctttcataactaatgggagttgcctggcctccagaaagacctcttttatgatggccctgtgccttagtagtatttatgaagatttgaagatgtaccaggtggagttcaagaccatgaatgcaaagcttctgatggatcctaagaggcagatctttttagatcaaaacatgctggcagttattgatgagctgatgcaggccctgaatttcaacagtgagacggtgccacaaaaatcctcccttgaagaaccagatttctacaagaccaagatcaagctctgcatacttcttcatgctttcagaattcgggcagtgactattgatagagtgatgagctatctgaatgcttcctgataataggctggagcctcggtggccatgcttcttgccccttgggcctccccccagcccctcctccccttcctgcacccgtaccccccaaacaccattgtcacactccagtggtctttgaataaagtctgagtgggcggc

SEQ ID NO: 1080 - protein, 21 aa, synthetic construct
  REGION 1..21: note = Human CD8A Transmembrane Domain
IYIWAPLAGTCGVLLLSLVIT

SEQ ID NO: 1081 - protein, 21 aa, synthetic construct
  REGION 1..21: note = Human PDGF-RB transmembrane domain
VVISAILALVVLTIISLIILI

SEQ ID NO: 1082 - protein, 21 aa, synthetic construct
  REGION 1..21: note = Human CD80 transmembrane domain
LLPSWAITLISVNGIFVICCL

SEQ ID NO: 1083 - DNA, 1832 bp, synthetic construct
  misc_feature 1..1832: note = hIL12AB_004
  source 1..1832: mol_type = other DNA
tcaagcttttggaccctcgtacagaagctaatacgactcactatagggaaataagagagaaaagaagagtaagaagaaatataagagccaccatgggctgccaccagcagctggtcatcagctggttctccctggtcttcctggccagccccctggtggccatctgggagctgaagaaagacgtctacgtagtagagttggattggtacccagacgcacctggagaaatggtggttctcacctgtgacacgccagaagaagacggtatcacctggacgctggaccagagctcagaagttcttggcagtggaaaaacgctgaccatacaagtaaaagaatttggggatgctggccagtacacctgccacaaaggaggagaagttctcagccacagcctgctgctgctgcacaagaaagaagatggcatctggagcacagatattttaaaagaccagaaggagcccaagaacaaaaccttccttcgatgtgaggccaagaactacagtggccgcttcacctgctggtggctcaccaccatcagcacagacctcaccttctcggtgaagagcagccgtggcagctcagacccccaaggagtcacctgtggggcggccacgctgtcggcagaaagagttcgaggtgacaacaaggaatatgaatactcggtggaatgtcaagaagattcggcctgcccggcggcagaagaaagtcttcccatagaagtcatggtggatgctgttcacaaattaaaatatgaaaactacaccagcagcttcttcatcagagatatcatcaagccagacccgcccaagaacctgcagctgaagcccctgaagaacagccggcaggtggaagtttcctgggagtacccagatacgtggagcacgccgcacagctacttcagcctcaccttctgtgtacaagtacaaggcaagagcaagagagagaagaaagatcgtgtcttcacagataaaacctcggcgacggtcatctgcaggaagaatgcctccatctcggttcgagcccaggaccgctactacagcagcagctggagtgagtgggcctcggtgccctgcagtggtggcggcggcggcggcagcagaaaccttcctgtggccacgccggaccctggcatgttcccgtgcctgcaccacagccaaaatttacttcgagctgtttctaacatgctgcagaaagcacggcaaactttagaattctacccctgcacctcagaagaaatagaccatgaagatatcaccaaagataaaaccagcactgtagaggcctgcctgcccctggagctcaccaagaatgaatcctgcctcaacagcagagagaccagcttcatcaccaatggcagctgcctggccagcaggaaaaccagcttcatgatggcgctctgcctgagcagcatctatgaagatttgaagatgtaccaagtagaatttaaaaccatgaatgccaagctgctcatggaccccaagcggcagatatttttggatcaaaacatgctggctgtcattgatgagctcatgcaagcattaaacttcaactcagagacggtgccccagaagagcagcctggaggagccagatttctacaaaaccaagatcaagctctgcatcttattacatgccttccgcatccgggcggtcaccattgaccgtgtcatgtcctacttaaatgccagctgataataggctggagcctcggtggccatgcttcttgccccttgggcctccccccagcccctcctccccttcctgcacccgtaccccccaaacaccattgtcacactccagtggtctttgaataaagtctgagtgggcggc

SEQ ID NO: 1084 - DNA, 1829 bp, synthetic construct
  misc_feature 1..1829: note = hIL12AB_005
  source 1..1829: mol_type = other DNA
tcaagcttttggaccctcgtacagaagctaatacgactcactatagggaaataagagagaaaagaagagtaagaagaaatataagagccaccatgtgccaccagcagctggtcatcagctggttctccctggtcttcctggccagccccctggtggccatctgggagctgaagaaagacgtctacgtagtagagttggattggtacccagacgcacctggagaaatggtggttctcacctgtgacacgccagaagaagacggtatcacctggacgctggaccagagctcagaagttcttggcagtggaaaaacgctgaccatacaagtaaaagaatttggggatgctggccagtacacctgccacaaaggaggagaagttctcagccacagcctgctgctgctgcacaagaaagaagatggcatctggagcacagatattttaaaagaccagaaggagcccaagaacaaaaccttccttcgatgtgaggccaagaactacagtggccgcttcacctgctggtggctcaccaccatcagcacagacctcaccttctcggtgaagagcagccgtggcagctcagacccccaaggagtcacctgtggggcggccacgctgtcggcagaaagagttcgaggtgacaacaaggaatatgaatactcggtggaatgtcaagaagattcggcctgcccggcggcagaagaaagtcttcccatagaagtcatggtggatgctgttcacaaattaaaatatgaaaactacaccagcagcttcttcatcagagatatcatcaagccagacccgcccaagaacctgcagctgaagcccctgaagaacagccggcaggtggaagtttcctgggagtacccagatacgtggagcacgccgcacagctacttcagcctcaccttctgtgtacaagtacaaggcaagagcaagagagagaagaaagatcgtgtcttcacagataaaacctcggcgacggtcatctgcaggaagaatgcctccatctcggttcgagcccaggaccgctactacagcagcagctggagtgagtgggcctcggtgccctgcagtggtggcggcggcggcggcagcagaaaccttcctgtggccacgccggaccctggcatgttcccgtgcctgcaccacagccaaaatttacttcgagctgtttctaacatgctgcagaaagcacggcaaactttagaattctacccctgcacctcagaagaaatagaccatgaagatatcaccaaagataaaaccagcactgtagaggcctgcctgcccctggagctcaccaagaatgaatcctgcctcaacagcagagagaccagcttcatcaccaatggcagctgcctggccagcaggaaaaccagcttcatgatggcgctctgcctgagcagcatctatgaagatttgaagatgtaccaagtagaatttaaaaccatgaatgccaagctgctcatggaccccaagcggcagatatttttggatcaaaacatgctggctgtcattgatgagctcatgcaagcattaaacttcaactcagagacggtgccccagaagagcagcctggaggagccagatttctacaaaaccaagatcaagctctgcatcttattacatgccttccgcatccgggcggtcaccattgaccgtgtcatgtcctacttaaatgccagctgataataggctggagcctcggtggccatgcttcttgccccttgggcctccccccagcccctcctccccttcctgcacccgtaccccccaaacaccattgtcacactccagtggtctttgaataaagtctgagtgggcggc

SEQ ID NO: 1085 - DNA, 1829 bp, synthetic construct
  misc_feature 1..1829: note = hIL12AB_006
  source 1..1829: mol_type = other DNA
tcaagcttttggaccctcgtacagaagctaatacgactcactatagggaaataagagagaaaagaagagtaagaagaaatataagagccaccatgtgccaccagcagctggtgatcagctggttcagcctggtgttcctggccagccccctggtggccatctgggagctgaagaaggacgtgtacgtggtggagttggattggtaccccgacgcccccggcgagatggtggtgctgacctgtgacacccccgaggaggacggcatcacctggaccctggaccagagcagcgaggtgctgggcagcggcaagaccctgaccatccaggtgaaggagttcggggacgccggccagtacacctgccacaagggcggcgaggtgctgagccacagcctgctgctgctgcacaagaaggaggacggcatctggagcacagatatcctgaaggaccagaaggagcccaagaacaagaccttcctgagatgcgaggccaagaactacagcggcagattcacctgctggtggctgaccaccatcagcacagatttgaccttcagcgtgaagagcagcagaggcagcagcgacccccagggcgtgacctgcggcgccgccaccctgagcgccgagagagtgagaggtgacaacaaggagtacgagtacagcgtggagtgccaggaagatagcgcctgccccgccgccgaggagagcctgcccatcgaggtgatggtggacgccgtgcacaagctgaagtacgagaactacaccagcagcttcttcatcagagatatcatcaagcccgacccgccgaagaacctgcagctgaagcccctgaagaacagccggcaggtggaggtgagctgggagtaccccgacacctggagcaccccccacagctacttcagcctgaccttctgcgtgcaggtgcagggcaagagcaagagagagaagaaagatagagtgttcacagataagaccagcgccaccgtgatctgcagaaagaacgccagcatcagcgtgagagcccaagatagatactacagcagcagctggagcgagtgggccagcgtgccctgcagcggcggcggcggcggcggcagcagaaacctgcccgtggccacccccgaccccggcatgttcccctgcctgcaccacagccagaacctgctgagagccgtgagcaacatgctgcagaaggcccggcagaccctggagttctacccctgcaccagcgaggagatcgaccacgaagatatcaccaaagataagaccagcaccgtggaggcctgcctgcccctggagctgaccaagaatgaaagctgcctgaacagcagagagaccagcttcatcaccaacggcagctgcctggccagcagaaagaccagcttcatgatggccctgtgcctgagcagcatctacgaggacctgaagatgtaccaggtggagttcaagaccatgaacgccaagctgctgatggaccccaagcggcagatcttcctggaccagaacatgctggccgtgatcgacgagctgatgcaggccctgaacttcaacagcgagaccgtgccccagaagagcagcctggaggagcccgacttctacaagaccaagatcaagctgtgcatcctgctgcacgccttcagaatcagagccgtgaccatcgacagagtgatgagctacctgaacgccagctgataataggctggagcctcggtggccatgcttcttgccccttgggcctccccccagcccctcctccccttcctgcacccgtaccccccaaacaccattgtcacactccagtggtctttgaataaagtctgagtgggcggc

SEQ ID NO: 1086 - DNA, 1829 bp, synthetic construct
  misc_feature 1..1829: note = hIL12AB_007
  source 1..1829: mol_type = other DNA
tcaagcttttggaccctcgtacagaagctaatacgactcactatagggaaataagagagaaaagaagagtaagaagaaatataagagccaccatgtgccaccagcagcttgtcatctcctggttctctcttgtcttccttgcttctcctcttgtggccatctgggagctgaagaaggacgtttacgtagtggagttggattggtaccctgacgcacctggagaaatggtggttctcacctgtgacactcctgaggaggacggtatcacctggacgttggaccagtcttctgaggttcttggcagtggaaaaactcttactattcaggtgaaggagtttggagatgctggccagtacacctgccacaagggtggtgaagttctcagccacagtttacttcttcttcacaagaaggaggatggcatctggtctactgacattttaaaagaccagaaggagcccaagaacaaaacattccttcgttgtgaagccaagaactacagtggtcgtttcacctgctggtggcttactactatttctactgaccttactttctctgtgaagtcttctcgtggctcttctgaccctcagggtgtcacctgtggggctgctactctttctgctgagcgtgtgcgtggtgacaacaaggagtatgaatactcggtggagtgccaggaagattctgcctgccctgctgctgaggagtctcttcctattgaggtgatggtggatgctgtgcacaagttaaaatatgaaaactacacttcttctttcttcattcgtgacattataaaacctgaccctcccaagaaccttcagttaaaacctttaaaaaactctcgtcaggtggaggtgtcctgggagtaccctgacacgtggtctactcctcactcctacttctctcttactttctgtgtccaggtgcagggcaagtccaagcgtgagaagaaggaccgtgtcttcactgacaaaacatctgctactgtcatctgcaggaagaatgcatccatctctgtgcgtgctcaggaccgttactacagctcttcctggtctgagtgggcttctgtgccctgctctggcggcggcggcggcggcagcagaaatcttcctgtggctactcctgaccctggcatgttcccctgccttcaccactcgcagaaccttcttcgtgctgtgagcaacatgcttcagaaggctcgtcaaactttagaattctacccctgcacttctgaggagattgaccatgaagatatcaccaaagataaaacatctactgtggaggcctgccttcctttagagctgaccaagaatgaatcctgcttaaattctcgtgagacgtctttcatcaccaatggcagctgccttgcctcgcgcaaaacatctttcatgatggctctttgcctttcttccatctatgaagatttaaaaatgtaccaggtggagttcaagaccatgaatgcaaagcttctcatggaccccaagcgtcagatatttttggaccagaacatgcttgctgtcattgatgagctcatgcaggctttaaacttcaactctgagacggtgcctcagaagtcttctttagaagagcctgacttctacaagaccaagataaaactttgcattcttcttcatgctttccgcatccgtgctgtgactattgaccgtgtgatgtcctacttaaatgcttcttgataataggctggagcctcggtggccaagcttcttgccccttgggcctccccccagcccctcctccccttcctgcacccgtaccccccaaacaccattgtcacactccagtggtctttgaataaagtctgagtgggcggc

SEQ ID NO: 1087 - DNA, 1829 bp, synthetic construct
  misc_feature 1..1829: note = hIL12AB_008
  source 1..1829: mol_type = other DNA
tcaagcttttggaccctcgtacagaagctaatacgactcactatagggaaataagagagaaaagaagagtaagaagaaatataagagccaccatgtgtcatcaacaactcgtgattagctggttcagtctcgtgttcctggcctctccgctggtggccatctgggagcttaagaaggacgtgtacgtggtggagctcgattggtaccccgacgcacctggcgagatggtggtgctaacctgcgatacccccgaggaggacgggatcacttggaccctggatcagagtagcgaagtcctgggctctggcaaaacactcacaatccaggtgaaggaattcggagacgctggtcagtacacttgccacaaggggggtgaagtgctgtctcacagcctgctgttactgcacaagaaggaggatgggatctggtcaaccgacatcctgaaggatcagaaggagcctaagaacaagacctttctgaggtgtgaagctaagaactattccggaagattcacttgctggtggttgaccacaatcagcactgacctgaccttttccgtgaagtccagcagaggaagcagcgatcctcagggcgtaacgtgcggcgcggctaccctgtcagctgagcgggttagaggcgacaacaaagagtatgagtactccgtggagtgtcaggaagatagcgcctgccccgcagccgaggagagtctgcccatcgaggtgatggtggacgctgtccataagttaaaatacgaaaattacacaagttcctttttcatccgcgatattatcaaacccgatccccccaagaacctgcagctgaagcccctgaagaatagccgacaggtggaagtctcttgggagtatcctgacacctggtccacgcctcacagctactttagtctgactttctgtgtccaggtccagggcaagagcaagagagagaaaaaggatagagtgtttactgacaaaacatctgctacagtcatctgcagaaagaacgccagtatctcagtgagggcgcaagatagatactacagtagtagctggagcgaatgggctagcgtgccctgttcagggggcggcggagggggctccaggaatctgcccgtggccacccccgaccctgggatgttcccttgcctccatcactcacagaacctgctcagagcagtgagcaacatgctccaaaaggcccgccagaccctggagttttacccttgtacttcagaagagatcgatcacgaagatataacaaaggataaaaccagcaccgtggaggcctgtctgcctctggaactcacaaagaatgaaagctgtctgaattccagggaaacctccttcattactaacggaagctgtctcgcatctcgcaaaacatcattcatgatggccctctgcctgtcttctatctatgaagatctcaagatgtatcaggtggagttcaaaacaatgaacgccaagctgctgatggaccccaagcggcagatcttcctggaccagaacatgctggcagtgatcgatgagctgatgcaagccttgaacttcaactcagagacggtgccgcaaaagtcctcgttggaggaaccagatttttacaaaaccaaaatcaagctgtgtatccttcttcacgcctttcggatcagagccgtgactatcgaccgggtgatgtcatacctgaatgcttcctgataataggctggagcctcggtggccatgcttcttgccccttgggcctccccccagcccctcctccccttcctgcacccgtaccccccaaacaccattgtcacactccagtggtctttgaataaagtctgagtgggcggc

SEQ ID NO: 1088 - DNA, 1829 bp, synthetic construct
  misc_feature 1..1829: note = hIL12AB_009
  source 1..1829: mol_type = other DNA
tcaagcttttggaccctcgtacagaagctaatacgactcactatagggaaataagagagaaaagaagagtaagaagaaatataagagccaccatgtgccaccagcagctggtcatcagctggtttagcctggtcttcctggccagccccctggtggccatctgggagctgaagaaagacgtctacgtagtagagttggattggtacccagacgcacctggagaaatggtggttctcacctgcgacacgccagaagaagacggtatcacctggacgctggaccagagcagcgaagtactgggcagtggaaaaacgctgaccatacaagtaaaagaatttggcgatgctggccagtacacctgccacaaaggaggagaagtactgagccacagcctgctgctgctgcacaagaaagaagatggcatctggagcaccgacattttaaaagaccagaaggagcccaagaacaaaaccttccttcgatgtgaggcgaagaactacagtggccgcttcacctgctggtggctcaccaccatcagcaccgacctcaccttctcggtgaagagcagccgtggtagctcagacccccaaggagtcacctgtggggcggccacgctgtcggcagaaagagttcgaggcgacaacaaggaatatgaatactcggtggaatgtcaagaagattcggcctgcccggcggcagaagaaagtctgcccatagaagtcatggtggatgctgttcacaaattaaaatatgaaaactacaccagcagcttcttcatcagagatatcatcaagccagacccccccaagaacctgcagctgaagcccctgaagaacagccggcaggtggaagtttcctgggagtacccagatacgtggagcacgccgcacagctacttcagcctcaccttctgtgtacaagtacaaggcaagagcaagagagagaagaaagatcgtgtcttcaccgacaaaacctcggcgacggtcatctgcaggaagaatgcaagcatctcggttcgagcccaggaccgctactacagcagcagctggagtgagtgggcctcggtgccctgcagtggtggcggcggcggcggcagcagaaaccttcctgtggccacgccggaccctggcatgtttccgtgcctgcaccacagccaaaatttattacgagctgttagcaacatgctgcagaaagcacggcaaactttagaattctacccctgcacctcagaagaaatagaccatgaagatatcaccaaagataaaaccagcactgtagaggcctgcctgcccctggagctcaccaagaacgagagctgcctcaatagcagagagaccagcttcatcaccaatggcagctgcctggccagcaggaaaaccagcttcatgatggcgctctgcctgagcagcatctatgaagatctgaagatgtaccaagtagaatttaaaaccatgaatgccaagctgctcatggaccccaagcggcagatattcctcgaccaaaacatgctggctgtcattgatgagctcatgcaagcattaaacttcaactcagagacggtgccccagaagagcagcctggaggagccagatttctacaaaaccaagatcaagctctgcatcttattacatgccttccgcatccgggcggtcaccattgaccgtgtcatgtcctacttaaatgccagctgataataggctggagcctcggtggccatgcttcttgccccttgggcctccccccagcccctcctccccttcctgcacccgtaccccccaaacaccattgtcacactccagtggtctttgaataaagtctgagtgggcggc

SEQ ID NO: 1089 - DNA, 1829 bp, synthetic construct
  misc_feature 1..1829: note = hIL12AB_010
  source 1..1829: mol_type = other DNA
tcaagcttttggaccctcgtacagaagctaatacgactcactatagggaaataagagagaaaagaagagtaagaagaaatataagagccaccatgtgccaccagcagcttgtcatctcctggttttctcttgtcttcctcgcttctcctcttgtggccatctgggagctgaagaaagacgtctacgtagtagagttggattggtacccggacgctcctggagaaatggtggttctcacctgcgacactcctgaagaagacggtatcacctggacgctggaccaaagcagcgaagttttaggctctggaaaaacgctgaccatacaagtaaaagaatttggcgacgctggccagtacacgtgccacaaaggaggagaagttttaagccacagtttacttcttcttcacaagaaagaagatggcatctggagtacagatattttaaaagaccagaaggagcctaagaacaaaaccttcctccgctgtgaagctaagaactacagtggtcgtttcacctgctggtggctcaccaccatctccactgacctcaccttctctgtaaaatcaagccgtggttcttctgacccccaaggagtcacctgtggggctgccacgctcagcgctgaaagagttcgaggcgacaacaaggaatatgaatattctgtggaatgtcaagaagattctgcctgcccggcggcagaagaaagtcttcccatagaagtcatggtggacgctgttcacaaattaaaatatgaaaactacaccagcagcttcttcattcgtgacatcatcaaaccagaccctcctaagaaccttcagttaaaaccgctgaagaacagccggcaggtggaagtttcctgggagtacccagatacgtggagtacgccgcactcctacttcagtttaaccttctgtgtacaagtacaaggaaaatcaaaaagagagaagaaagatcgtgtcttcactgacaaaacatctgccacggtcatctgccgtaagaacgcttccatctcggttcgagcccaggaccgctactacagcagcagctggagtgagtgggcatctgttccctgcagtggtggcggcggcggcggcagccgcaaccttcctgtggccacgccggaccctggcatgttcccgtgccttcaccactcgcaaaatcttcttcgtgctgtttctaacatgctgcagaaggcgcggcaaactttagaattctacccgtgcacttctgaagaaatagaccatgaagatatcaccaaagataaaaccagcacggtggaggcctgccttcctttagaacttactaagaacgaaagttgccttaacagccgtgagaccagcttcatcaccaatggcagctgccttgctagcaggaagaccagcttcatgatggcgctgtgcctttcttccatctatgaagatcttaagatgtaccaagtagaatttaaaaccatgaatgccaaattattaatggaccccaagcggcagatattcctcgaccaaaacatgctggctgtcattgatgagctcatgcaagcattaaacttcaactcagaaactgttccccagaagtcatctttagaagaaccagatttctacaaaacaaaaataaaactctgcattcttcttcatgccttccgcatccgtgctgtcaccattgaccgtgtcatgtcctacttaaatgcttcttgataataggctggagcctcggtggccatgcttcttgccccttgggcctccccccagcccctcctccccttcctgcacccgtaccccccaaacaccattgtcacactccagtggtctttgaataaagtctgagtgggcggc

SEQ ID NO: 1090 - DNA, 1829 bp, synthetic construct
  misc_feature 1..1829: note = hIL12AB_011
  source 1..1829: mol_type = other DNA
tcaagcttttggaccctcgtacagaagctaatacgactcactatagggaaataagagagaaaagaagagtaagaagaaatataagagccaccatgtgccaccagcagctggtgatcagctggttcagcctggtgttcctggccagccccctggtggccatctgggagctgaagaaggacgtgtacgtggtggagttggattggtacccggacgcgccgggggagatggtggtgctgacgtgcgacacgccggaggaggacgggatcacgtggacgctggaccagagcagcgaggtgctggggagcgggaagacgctgacgatccaggtgaaggagttcggggacgcggggcagtacacgtgccacaaggggggggaggtgctgagccacagcctgctgctgctgcacaagaaggaggacgggatctggagcacagatatcctgaaggaccagaaggagccgaagaacaagacgttcctgaggtgcgaggcgaagaactacagcgggaggttcacgtgctggtggctgacgacgatcagcacggacctgacgttcagcgtgaagagcagcagggggagcagcgacccgcagggggtgacgtgcggggcggcgacgctgagcgcggagagggtgaggggtgacaacaaggagtacgagtacagcgtggagtgccaggaagatagcgcgtgcccggcggcggaggagagcctgccgatcgaggtgatggtggacgcggtgcacaagctgaagtacgagaactacacgagcagcttcttcatcagagatatcatcaagccggacccgccgaagaacctgcagctgaagccgctgaagaacagcaggcaggtggaggtgagctgggagtacccagatacgtggagcacgccgcacagctacttcagcctgacgttctgcgtgcaggtgcaggggaagagcaagagggagaagaaagatagggtgttcacagataagacgagcgcgacggtgatctgcaggaagaacgcgagcatcagcgtgagggcgcaagataggtactacagcagcagctggagcgagtgggcgagcgtgccgtgcagcggggggggggggggggggagcaggaacctgccggtggcgacgccggacccggggatgttcccgtgcctgcaccacagccagaacctgctgagggcggtgagcaacatgctgcagaaggcgaggcagacgctggagttctacccgtgcacgagcgaggagatcgaccacgaagatatcacgaaagataagacgagcacggtggaggcgtgcctgccgctggagctgacgaagaacgagagctgcctgaacagcagggagacgagcttcatcacgaacgggagctgcctggcgagcaggaagacgagcttcatgatggcgctgtgcctgagcagcatctacgaggacctgaagatgtaccaggtggagttcaagacgatgaacgcgaagctgctgatggacccgaagaggcagatcttcctggaccagaacatgctggcggtgatcgacgagctgatgcaggcgctgaacttcaacagcgagacggtgccgcagaagagcagcctggaggagccagatttctacaagacgaagatcaagctgtgcatcctgctgcacgcgttcaggatcagggcggtgacgatcgacagggtgatgagctacctgaacgcgagctgataataggctggagcctcggtggccatgcttcttgccccttgggcctccccccagcccctcctccccttcctgcacccgtaccccccaaacaccattgtcacactccagtggtctttgaataaagtctgagtgggcggc

SEQ ID NO: 1091 - DNA, 1829 bp, synthetic construct
  misc_feature 1..1829: note = hIL12AB_012
  source 1..1829: mol_type = other DNA
tcaagcttttggaccctcgtacagaagctaatacgactcactatagggaaataagagagaaaagaagagtaagaagaaatataagagccaccatgtgccatcagcagctggtgatcagctggttcagcctcgtgtttctggccagccccctggtggccatttgggaactcaagaaggacgtgtacgttgtggaactcgactggtaccctgacgccccaggcgaaatggtggtcttaacctgcgacacccctgaggaggacggaatcacctggaccttggaccagagctccgaggtcctcggcagtggcaagaccctgaccatacaggtgaaagaatttggagacgcagggcaatacacatgtcacaagggcggggaggttctttctcactcccttctgcttctacataaaaaggaagacggaatttggtctaccgacatcctcaaggaccaaaaggagcctaagaataaaaccttcttacgctgtgaagctaaaaactacagcggcagattcacttgctggtggctcaccaccatttctaccgacctgaccttctcggtgaagtcttcaaggggctctagtgatccacagggagtgacatgcggggccgccacactgagcgctgaacgggtgaggggcgataacaaggagtatgaatactctgtcgagtgtcaggaggattcagcttgtcccgcagctgaagagtcactccccatagaggttatggtcgatgctgtgcataaactgaagtacgaaaactacaccagcagcttcttcattagagatattataaaacctgacccccccaagaacctgcaacttaaacccctgaaaaactctcggcaggtcgaagttagctgggagtaccctgatacttggtccaccccccactcgtacttctcactgactttctgtgtgcaggtgcagggcaagagcaagagagagaaaaaagatcgtgtattcacagataagacctctgccaccgtgatctgcagaaaaaacgcttccatcagtgtcagagcccaagaccggtactatagtagtagctggagcgagtgggcaagtgtcccctgctctggcggcggagggggcggctctcgaaacctccccgtcgctacccctgatccaggaatgttcccttgcctgcatcactcacagaatctgctgagagcggtcagcaacatgctgcagaaagctaggcaaacactggagttttatccttgtacctcagaggagatcgaccacgaggatattaccaaagataagaccagcacggtggaggcctgcttgcccctggaactgacaaagaatgaatcctgccttaatagccgtgagacctcttttataacaaacggatcctgcctggccagcaggaagacctccttcatgatggccctctgcctgtcctcaatctacgaagacctgaagatgtaccaggtggaatttaaaactatgaacgccaagctgttgatggaccccaagcggcagatctttctggatcaaaatatgctggctgtgatcgacgaactgatgcaggccctcaactttaacagcgagaccgtgccacaaaagagcagtcttgaggagcccgacttctacaagaccaagatcaagctgtgcatcctccttcatgccttcaggataagagctgtcaccatcgacagagtcatgagttacctgaatgcatcctgataataggctggagcctcggtggccatgcttcttgccccttgggcctccccccagcccctcctccccttcctgcacccgtaccccccaaacaccattgtcacactccagtggtctttgaataaagtctgagtgggcggc

SEQ ID NO: 1092 - DNA, 1829 bp, synthetic construct
  misc_feature 1..1829: note = hIL12AB_013
  source 1..1829: mol_type = other DNA
tcaagcttttggaccctcgtacagaagctaatacgactcactatagggaaataagagagaaaagaagagtaagaagaaatataagagccaccatgtgccaccagcagctggtcatctcctggttcagtcttgtcttcctggcctcgccgctggtggccatctgggagctgaagaaagacgtttacgtagtagagttggattggtacccagacgcacctggagaaatggtggtcctcacctgtgacacgccagaagaagacggtatcacctggacgctggaccagagcagtgaagttcttggaagtggaaaaacgctgaccatacaagtaaaagaatttggagatgctggccagtacacctgccacaaaggaggagaagttctcagccacagtttattattacttcacaagaaagaagatggcatctggtccacagatattttaaaagaccagaaggagcccaaaaataaaacatttcttcgatgtgaggccaagaactacagtggtcgtttcacctgctggtggctgaccaccatctccacagacctcaccttcagtgtaaaaagcagccgtggttcttctgacccccaaggagtcacctgtggggctgccacgctctctgcagaaagagttcgaggtgacaacaaagaatatgagtactcggtggaatgtcaagaagattcggcctgcccagctgctgaggagagtcttcccatagaagtcatggtggatgctgttcacaaattaaaatatgaaaactacaccagcagcttcttcatcagagatatcatcaaacctgacccgcccaagaacttacagctgaagccgctgaaaaacagccggcaggtagaagtttcctgggagtacccagatacctggtccacgccgcactcctacttctccctcaccttctgtgtacaagtacaaggcaagagcaagagagagaagaaagatcgtgtcttcacagataaaacatcagccacggtcatctgcaggaaaaatgccagcatctcggtgcgggcccaggaccgctactacagcagcagctggagtgagtgggcatctgtgccctgcagtggtggtgggggtggtggcagcagaaaccttcctgtggccactccagaccctggcatgttcccgtgccttcaccactcccaaaatttacttcgagctgtttctaacatgctgcagaaagcacggcaaactttagaattctacccgtgcacttctgaagaaattgaccatgaagatatcacaaaagataaaaccagcacagtggaggcctgtcttcctttagagctgaccaaaaatgaatcctgcctcaacagcagagagaccagcttcatcaccaatggcagctgcctggcctccaggaaaaccagcttcatgatggcgctctgcctcagctccatctatgaagatttgaagatgtaccaagtagaatttaaaaccatgaatgccaaattattaatggaccccaagaggcagatatttttagatcaaaacatgctggcagttattgatgagctcatgcaagcattaaacttcaacagtgagacggtacctcaaaaaagcagccttgaagagccagatttctacaaaaccaagatcaaactctgcattttacttcatgccttccgcatccgggcggtcaccattgaccgtgtcatgtcctacttaaatgcctcgtgataataggctggagcctcggtggccatgcttcttgccccttgggcctccccccagcccctcctccccttcctgcacccgtaccccccaaacaccattgtcacactccagtggtctttgaataaagtctgagtgggcggc

SEQ ID NO: 1093 - DNA, 1829 bp, synthetic construct
  misc_feature 1..1829: note = hIL12AB_014
  source 1..1829: mol_type = other DNA
tcaagcttttggaccctcgtacagaagctaatacgactcactatagggaaataagagagaaaagaagagtaagaagaaatataagagccaccatgtgccaccagcagcttgtgatttcttggttctctcttgtgttccttgcttctcctcttgtggctatttgggagttaaaaaaggacgtgtacgtggtggagcttgactggtaccctgacgcacctggcgagatggtggtgcttacttgtgacactcctgaggaggacggcattacttggacgcttgaccagtcttctgaggtgcttggctctggcaaaacacttactattcaggtgaaggagttcggggatgctggccagtacacttgccacaagggcggcgaggtgctttctcactctcttcttcttcttcacaagaaggaggacggcatttggtctactgacattttaaaagaccagaaggagcccaagaacaaaacattccttcgttgcgaggccaagaactactctggccgtttcacttgctggtggcttactactatttctactgaccttactttctctgtgaagtcttctcgtggctcttctgaccctcagggcgtgacttgtggggctgctactctttctgctgagcgtgtgcgtggtgacaacaaggagtacgagtactctgtggagtgccaggaagattctgcttgccctgctgctgaggagtctcttcctattgaggtgatggtggatgctgtgcacaagttaaaatacgagaactacacttcttctttcttcattcgtgacattattaagcctgaccctcccaagaaccttcagttaaaacctttaaaaaactctcgtcaggtggaggtgtcttgggagtaccctgacacttggtctactcctcactcttacttctctcttactttctgcgtgcaggtgcagggcaagtctaagcgtgagaagaaggaccgtgtgttcactgacaaaacatctgctactgtgatttgcaggaagaatgcatctatttctgtgcgtgctcaggaccgttactactcttcttcttggtctgagtgggcttctgtgccttgctctggcggcggcggcggcggctccagaaatcttcctgtggctactcctgaccctggcatgttcccttgccttcaccactctcagaaccttcttcgtgctgtgagcaacatgcttcagaaggctcgtcaaactcttgagttctacccttgcacttctgaggagattgaccacgaagatatcaccaaagataaaacatctactgtggaggcttgccttcctcttgagcttaccaagaatgaatcttgcttaaattctcgtgagacgtctttcatcaccaacggctcttgccttgcctcgcgcaaaacatctttcatgatggctctttgcctttcttctatttacgaagatttaaaaatgtaccaggtggagttcaaaacaatgaatgcaaagcttcttatggaccccaagcgtcagattttccttgaccagaacatgcttgctgtgattgacgagcttatgcaggctttaaatttcaactctgagacggtgcctcagaagtcttctcttgaggagcctgacttctacaagaccaagattaagctttgcattcttcttcatgctttccgtattcgtgctgtgactattgaccgtgtgatgtcttacttaaatgcttcttgataataggctggagcctcggtggccatgcttcttgccccttgggcctccccccagcccctcctccccttcctgcacccgtaccccccaaacaccattgtcacactccagtggtctttgaataaagtctgagtgggcggc

SEQ ID NO: 1094 - DNA, 1829 bp, synthetic construct
  misc_feature 1..1829: note = hIL12AB_015
  source 1..1829: mol_type = other DNA
tcaagcttttggaccctcgtacagaagctaatacgactcactatagggaaataagagagaaaagaagagtaagaagaaatataagagccaccatgtgtcaccagcagctggtgatcagctggtttagcctggtgtttctggccagccccctggtggccatctgggaactgaagaaagacgtgtacgtggtagaactggattggtatccggacgctcccggcgaaatggtggtgctgacctgtgacacccccgaagaagacggaatcacctggaccctggaccagagcagcgaggtgctgggcagcggcaaaaccctgaccatccaagtgaaagagtttggcgatgccggccagtacacctgtcacaaaggcggcgaggtgctaagccattcgctgctgctgctgcacaaaaaggaagatggcatctggagcaccgatatcctgaaggaccagaaagaacccaaaaataagacctttctaagatgcgaggccaagaattatagcggccgtttcacctgctggtggctgacgaccatcagcaccgatctgaccttcagcgtgaaaagcagcagaggcagcagcgacccccaaggcgtgacgtgcggcgccgccaccctgagcgccgagagagtgagaggcgacaacaaggagtatgagtacagcgtggagtgccaggaagatagcgcctgccccgccgccgaggagagcctgcccatcgaggtgatggtggatgccgtgcacaagctgaagtatgaaaactacaccagcagcttcttcatcagagatatcatcaaacccgacccccccaagaacctgcagctgaagcccctgaagaatagccggcaggtggaggtgagctgggagtaccccgacacctggagcaccccccatagctacttcagcctgaccttctgcgtgcaggtgcagggcaagagcaagagagaaaagaaagatagagtgttcacagataagaccagcgccacggtgatctgcagaaaaaatgccagcatcagcgtgagagcccaagatagatactatagcagcagctggagcgaatgggccagcgtgccctgcagcggcggcggcggcggcggcagcagaaacctgcccgtggccacccccgaccccggcatgttcccctgcctgcaccacagccaaaacctgctgagagccgtgagcaacatgctgcagaaggcccggcagaccctggaattttacccctgcaccagcgaagagatcgatcatgaagatatcaccaaagataaaaccagcaccgtggaggcctgtctgcccctggaactgaccaagaatgagagctgcctaaatagcagagagaccagcttcataaccaatggcagctgcctggccagcagaaagaccagctttatgatggccctgtgcctgagcagcatctatgaagacctgaagatgtaccaggtggagttcaagaccatgaatgccaagctgctgatggatcccaagcggcagatctttctggatcaaaacatgctggccgtgatcgatgagctgatgcaggccctgaatttcaacagcgagaccgtgccccaaaaaagcagcctggaagaaccggatttttataaaaccaaaatcaagctgtgcatactgctgcatgccttcagaatcagagccgtgaccatcgatagagtgatgagctatctgaatgccagctgataataggctggagcctcggtggccatgcttcttgccccttgggcctccccccagcccctcctccccttcctgcacccgtaccccccaaacaccattgtcacactccagtggtctttgaataaagtctgagtgggcggc

SEQ ID NO: 1095 - DNA, 1829 bp, synthetic construct
  misc_feature 1..1829: note = hIL12AB_016
  source 1..1829: mol_type = other DNA
tcaagcttttggaccctcgtacagaagctaatacgactcactatagggaaataagagagaaaagaagagtaagaagaaatataagagccaccatgtgccaccagcagctggtcatcagctggttcagcctggtcttcctggccagccccctggtggccatctgggagctgaagaaggacgtatacgtagtggagttggattggtacccagacgctcctggggagatggtggtgctgacctgtgacaccccagaagaggacggtatcacctggaccctggaccagagctcagaagtgctgggcagtggaaaaaccctgaccatccaggtgaaggagtttggagatgctggccagtacacctgccacaagggtggtgaagtgctgagccacagcctgctgctgctgcacaagaaggaggatggcatctggagcacagatatcctgaaggaccagaaggagcccaagaacaagaccttccttcgctgtgaagccaagaactacagtggccgcttcacctgctggtggctgaccaccatcagcacagacctcaccttctcggtgaagagcagcagaggcagctcagacccccagggtgtcacctgtggggcggccacgctgtcggcggagagagttcgaggtgacaacaaggagtatgaatactcggtggagtgccaggaagattcggcgtgcccggcggcagaagagagcctgcccatagaagtgatggtggatgctgtgcacaagctgaagtatgaaaactacaccagcagcttcttcatcagagatatcatcaagccagacccgcccaagaacctgcagctgaagcccctgaagaacagccggcaggtggaggtttcctgggagtacccagatacgtggagcaccccccacagctacttcagcctgaccttctgtgtccaggtgcagggcaagagcaagagagagaagaaagatagagtcttcacagataagacctcggccacggtcatctgcagaaagaatgcctccatctcggttcgagcccaagatagatactacagcagcagctggtcagaatgggcctcggtgccctgcagtggtggcggcggcggcggcagcagaaacctgcctgttgccaccccagaccctgggatgttcccctgcctgcaccacagccagaacttattacgagctgtttctaacatgctgcagaaggcccggcagaccctggagttctacccctgcacctcagaagagattgaccatgaagatatcaccaaagataagaccagcactgtagaggcctgcctgcccctggagctgaccaagaatgaaagctgcctgaacagcagagagaccagcttcatcaccaatggaagctgcctggccagcagaaagaccagcttcatgatggccctgtgcctgagcagcatctatgaagacctgaagatgtaccaggtggagttcaagaccatgaatgcaaagctgctgatggaccccaagcggcagatatttttggaccagaacatgctggctgtcattgatgagctgatgcaggccctgaacttcaactcagaaactgtaccccagaagagcagcctggaggagccagatttctacaagaccaagatcaagctgtgcatcctgcttcatgctttcagaatcagagctgtcaccattgaccgcgtgatgagctacttaaatgcctcgtgataataggctggagcctcggtggccatgcttcttgccccttgggcctccccccagcccctcctccccttcctgcacccgtaccccccaaacaccattgtcacactccagtggtctttgaataaagtctgagtgggcggc

SEQ ID NO: 1096 - DNA, 1829 bp, synthetic construct
  misc_feature 1..1829: note = hIL12AB_017
  source 1..1829: mol_type = other DNA
tcaagcttttggaccctcgtacagaagctaatacgactcactatagggaaataagagagaaaagaagagtaagaagaaatataagagccaccatgtgccaccagcagctggtaatcagctggttttccctcgtctttctggcatcacccctggtggctatctgggagctgaagaaggacgtgtacgtggtggagctggattggtaccctgacgccccgggggaaatggtggtgttaacctgcgacacgcctgaggaggacggcatcacctggacgctggaccagagcagcgaggtgcttgggtctggtaaaactctgactattcaggtgaaagagttcggggatgccggccaatatacttgccacaagggtggcgaggtgctttctcattctctgctcctgctgcacaagaaagaagatggcatttggtctactgatattctgaaagaccagaaggagcccaagaacaagacctttctgagatgcgaggctaaaaactacagcggaagatttacctgctggtggctgaccacaatctcaaccgacctgacattttcagtgaagtccagcagagggagctccgaccctcagggcgtgacctgcggagccgccactctgtccgcagaaagagtgagaggtgataataaggagtacgagtattcagtcgagtgccaagaagattctgcctgcccagccgccgaggagagcctgccaatcgaggtgatggtagatgcggtacacaagctgaagtatgagaactacacatcctccttcttcataagagatattatcaagcctgacccacctaaaaatctgcaactcaagcctttgaaaaattcacggcaggtggaggtgagctgggagtaccctgatacttggagcaccccccatagctacttttcgctgacattctgcgtccaggtgcagggcaagtcaaagagagagaagaaggatcgcgtgttcactgataaaacaagcgccacagtgatctgcagaaaaaacgctagcattagcgtcagagcacaggaccggtattactccagctcctggagcgaatgggcatctgtgccctgcagcggtgggggcggaggcggatccagaaacctccccgttgccacacctgatcctggaatgttcccctgtctgcaccacagccagaacctgctgagagcagtgtctaacatgctccagaaggccaggcagaccctggagttttacccctgcaccagcgaggaaatcgatcacgaagatatcaccaaagataaaacctccaccgtggaggcctgcctgcccctggaactgaccaaaaacgagagctgcctgaatagcagggagacctccttcatcaccaacggctcatgccttgccagccggaaaactagcttcatgatggccctgtgcctgtcttcgatctatgaggacctgaaaatgtaccaggtcgaatttaagacgatgaacgcaaagctgctgatggaccccaagcggcagatctttctggaccagaacatgctggcagtcatagatgagttgatgcaggcattaaacttcaacagcgagaccgtgcctcagaagtccagcctcgaggagccagatttttataagaccaagatcaaactatgcatcctgctgcatgctttcaggattagagccgtcaccatcgatcgagtcatgtcttacctgaatgctagctgataataggctggagcctcggtggccatgcttcttgccccttgggcctccccccagcccctcctccccttcctgcacccgtaccccccaaacaccattgtcacactccagtggtctttgaataaagtctgagtgggcggc

SEQ ID NO: 1097 - DNA, 1829 bp, synthetic construct
  misc_feature 1..1829: note = hIL12AB_018
  source 1..1829: mol_type = other DNA
tcaagcttttggaccctcgtacagaagctaatacgactcactatagggaaataagagagaaaagaagagtaagaagaaatataagagccaccatgtgtcaccaacagttagtaatctcctggttttctctggtgtttctggccagccccctcgtggccatctgggagcttaaaaaggacgtttacgtggtggagttggattggtatcccgacgctccaggcgaaatggtcgtgctgacctgcgatacccctgaagaagacggtatcacctggacgctggaccagtcttccgaggtgcttggatctggcaaaacactgacaatacaagttaaggagttcggggacgcagggcagtacacctgccacaaaggcggcgaggtcctgagtcactccctgttactgctccacaagaaagaggacggcatttggtccaccgacattctgaaggaccagaaggagcctaagaataaaactttcctgagatgcgaggcaaaaaactatagcggccgctttacttgctggtggcttacaacaatctctaccgatttaactttctccgtgaagtctagcagaggatcctctgacccgcaaggagtgacttgcggagccgccaccttgagcgccgaaagagtccgtggcgataacaaagaatacgagtactccgtggagtgccaggaagattccgcctgcccagctgccgaggagtccctgcccattgaagtgatggtggatgccgtccacaagctgaagtacgaaaactataccagcagcttcttcatccgggatatcattaagcccgaccctcctaaaaacctgcaacttaagcccctaaagaatagtcggcaggttgaggtcagctgggaatatcctgacacatggagcaccccccactcttatttctccctgaccttctgcgtgcaggtgcagggcaagagtaaacgggagaaaaaagatagggtctttaccgataaaaccagcgctacggttatctgtcggaagaacgcttccatctccgtccgcgctcaggatcgttactactcgtcctcatggagcgagtgggccagcgtgccctgcagcggcggcggtggaggcggatccagaaatctgcctgttgccacaccagaccctggcatgttcccctgtctgcatcatagccagaacctgctcagagccgtgagcaacatgctccagaaggccaggcaaactttggagttctacccgtgtacatctgaggaaatcgatcacgaagatataaccaaagataaaacctctacagtagaggcttgtttgcccctggagttgaccaaaaacgagagttgcctgaacagtcgcgagacgagcttcattactaacggcagctgtctcgcctccagaaaaacatccttcatgatggccctgtgtctttccagcatatacgaagacctgaaaatgtaccaggtcgagttcaaaacaatgaacgccaagctgcttatggaccccaagcggcagatcttcctcgaccaaaacatgctcgctgtgatcgatgagctgatgcaggctctcaacttcaattccgaaacagtgccacagaagtccagtctggaagaacccgacttctacaagaccaagattaagctgtgtattttgctgcatgcgtttagaatcagagccgtgaccattgatcgggtgatgagctacctgaacgcctcgtgataataggctggagcctcggtggccatgcttcttgccccttgggcctccccccagcccctcctccccttcctgcacccgtaccccccaaacaccattgtcacactccagtggtctttgaataaagtctgagtgggcggc

SEQ ID NO: 1098 - DNA, 1829 bp, synthetic construct
  misc_feature 1..1829: note = hIL12AB_019
  source 1..1829: mol_type = other DNA
tcaagcttttggaccctcgtacagaagctaatacgactcactatagggaaataagagagaaaagaagagtaagaagaaatataagagccaccatgtgccaccagcagcttgtcatctcctggttttctcttgtcttcctggcctcgccgctggtggccatctgggagctgaagaaagacgtttacgtagtagagttggattggtacccagacgcacctggagaaatggtggttctcacctgtgacactcctgaagaagacggtatcacctggacgctggaccaaagctcagaagttcttggcagtggaaaaacgctgaccatacaagtaaaagaatttggggatgctggccagtacacgtgccacaaaggaggagaagttctcagccacagtttacttcttcttcacaagaaagaagatggcatctggtccacagatattttaaaagaccagaaggagcccaagaacaaaaccttcctccgctgtgaggccaagaactacagtggtcgtttcacctgctggtggctcaccaccatctccactgacctcaccttctctgtaaaaagcagccgtggttcttctgacccccaaggagtcacctgtggggctgccacgctctcggcagaaagagttcgaggtgacaacaaggaatatgaatattctgtggaatgtcaagaagattctgcctgcccggcggcagaagaaagtcttcccatagaagtcatggtggatgctgttcacaaattaaaatatgaaaactacaccagcagcttcttcattcgtgacatcatcaaaccagacccgcccaagaaccttcagttaaaacctttaaaaaacagccggcaggtagaagtttcctgggagtacccagatacgtggtccacgccgcactcctacttcagtttaaccttctgtgtacaagtacaaggaaaatcaaaaagagagaagaaagatcgtgtcttcactgacaaaacatctgccacggtcatctgcaggaagaatgcctccatctcggttcgagcccaggaccgctactacagcagcagctggagtgagtgggcatctgttccctgcagtggtggcggcggcggcggcagccgcaaccttcctgtggccacgccggaccctggcatgttcccgtgccttcaccactcccaaaatcttcttcgtgctgtttctaacatgctgcagaaggcgcgccaaactttagaattctacccgtgcacttctgaagaaatagaccatgaagatatcaccaaagataaaaccagcacggtggaggcctgccttcctttagagctgaccaagaatgaatcctgcctcaacagcagagagaccagcttcatcaccaatggcagctgcctggcctcgcgcaagaccagcttcatgatggcgctgtgcctttcttccatctatgaagatttaaagatgtaccaagtagaatttaaaaccatgaatgccaaattattaatggaccccaaacggcagatatttttggatcaaaacatgctggctgtcattgatgagctcatgcaagcattaaacttcaactcagaaactgttccccagaagtcatctttagaagagccagatttctacaaaacaaaaataaaactctgcattcttcttcatgccttccgcatccgtgctgtcaccattgaccgtgtcatgtcctacttaaatgcttcttgataataggctggagcctcggtggccatgcttcttgccccttgggcctccccccagcccctcctccccttcctgcacccgtaccccccaaacaccattgtcacactccagtggtctttgaataaagtctgagtgggcggc

SEQ ID NO: 1099 - DNA, 1829 bp, synthetic construct
  misc_feature 1..1829: note = hIL12AB_020
  source 1..1829: mol_type = other DNA
tcaagcttttggaccctcgtacagaagctaatacgactcactatagggaaataagagagaaaagaagagtaagaagaaatataagagccaccatgtgccaccagcagctggtgatcagctggttcagcctggtgttcctggctagccctctggtggccatctgggagctgaagaaggacgtgtacgtggtggagttggattggtaccccgacgctcccggcgagatggtggtgctgacctgcgacacccccgaggaggacgggatcacctggaccctggatcagtcaagcgaggtgctgggaagcggcaagaccctgaccatccaggtgaaggagttcggcgacgccggccaatacacttgccacaagggaggcgaggtgctgtcccactccctcctgctgctgcacaaaaaggaagacggcatctggagcaccgacatcctgaaagaccagaaggagcctaagaacaaaacattcctcagatgcgaggccaagaattactccgggagattcacctgttggtggctgaccaccatcagcacagacctgaccttcagcgtgaagagcagcagaggcagcagcgacccccagggcgtgacctgtggcgccgccaccctgagcgccgaaagagtgcgcggcgacaacaaggagtacgagtactccgtggaatgccaggaagatagcgcctgccccgccgccgaggagagcctgcccatcgaggtgatggtggacgccgtccacaagctgaagtacgagaactacacctctagcttcttcatcagagatatcatcaagcccgatccccccaagaacctgcagctgaaacccctgaagaacagccggcaggtggaggtgagctgggagtatcccgacacctggtccaccccccacagctattttagcctgaccttctgcgtgcaagtgcagggcaagagcaagagagagaagaaggaccgcgtgttcaccgacaaaaccagcgccaccgtgatctgcagaaagaacgccagcatcagcgtgagggcccaggatagatactacagttccagctggagcgagtgggccagcgtgccctgcagcggcggcggcgggggaggctcgagaaacctgcccgtggctacccccgatcccggaatgttcccctgcctgcaccacagccagaacctgctgagggcggtgtccaacatgcttcagaaggcccggcagaccctggagttctacccctgtacctctgaggagatcgatcatgaagatatcacaaaagataaaaccagcaccgtggaggcctgcctgcccctggagctgaccaagaacgagagctgcctgaactcccgcgagaccagcttcatcacgaacggcagctgcctggccagcaggaagacctccttcatgatggccctgtgcctgagcagcatctacgaggacctgaaaatgtaccaggtggagtttaagaccatgaacgccaagctgctgatggaccccaagcggcaaatcttcctggaccagaacatgctggcagtgatcgacgagctcatgcaggccctgaacttcaatagcgagacggtcccccagaagagcagcctggaggagcccgacttttacaagaccaagatcaagctgtgcatcctgctgcacgcctttagaatccgtgccgtgaccattgacagagtgatgagctacctgaatgccagctgataataggctggagcctcggtggccatgcttcttgccccttgggcctccccccagcccctcctccccttcctgcacccgtaccccccaaacaccattgtcacactccagtggtctttgaataaagtctgagtgggcggc

SEQ ID NO: 1100 - DNA, 1829 bp, synthetic construct
  misc_feature 1..1829: note = hIL12AB_021
  source 1..1829: mol_type = other DNA
tcaagcttttggaccctcgtacagaagctaatacgactcactatagggaaataagagagaaaagaagagtaagaagaaatataagagccaccatgtgccaccagcagctggtgatcagctggttcagcctggtgttcctggccagccctctggttgccatctgggagctgaagaaagacgtgtacgtcgtggaactggactggtatccggacgccccgggcgagatggtggtgctgacctgtgacacccccgaggaggacggcatcacctggacgctggaccaatcctccgaggtgctgggaagcggcaagaccctgaccatccaggtgaaggaattcggggacgccgggcagtacacctgccacaaggggggcgaagtgctgtcccactcgctgctgctcctgcataagaaggaggatggaatctggtccaccgacatcctcaaagatcagaaggagcccaagaacaagacgttcctgcgctgtgaagccaagaattattcggggcgattcacgtgctggtggctgacaaccatcagcaccgacctgacgtttagcgtgaagagcagcagggggtccagcgacccccagggcgtgacgtgcggcgccgccaccctctccgccgagagggtgcggggggacaataaggagtacgagtacagcgtggaatgccaggaggacagcgcctgccccgccgcggaggaaagcctcccgatagaggtgatggtggacgccgtgcacaagctcaagtatgagaattacaccagcagctttttcatccgggacattatcaagcccgaccccccgaagaacctccagctgaagcccctgaagaacagccggcaggtggaagtctcctgggagtatcccgacacctggagcaccccgcacagctacttctccctgaccttctgtgtgcaggtgcagggcaagtccaagagggaaaagaaggacagggttttcaccgacaagaccagcgcgaccgtgatctgccggaagaacgccagcataagcgtccgcgcccaagataggtactacagcagctcctggagcgagtgggctagcgtgccctgcagcgggggcgggggtgggggctccaggaacctgccagtggcgacccccgaccccggcatgttcccctgcctccatcacagccagaacctgctgagggccgtcagcaatatgctgcagaaggccaggcagaccctggaattctacccctgcacgtcggaggagatcgatcacgaggatatcacaaaagacaagacttccaccgtggaggcctgcctgcccctggagctcaccaagaatgagtcctgtctgaactcccgggaaaccagcttcatcaccaacgggtcctgcctggccagcaggaagaccagctttatgatggccctgtgcctgtcgagcatctacgaggacctgaagatgtaccaggtcgagttcaagacaatgaacgccaagctgctgatggaccccaagaggcaaatcttcctggaccagaatatgcttgccgtcatcgacgagctcatgcaggccctgaacttcaactccgagaccgtgccccagaagagcagcctggaggagcccgacttctacaagaccaagatcaagctgtgcatcctgctgcacgcgttcaggatccgggcagtcaccatcgaccgtgtgatgtcctacctgaacgccagctgataataggctggagcctcggtggccatgcttcttgccccttgggcctccccccagcccctcctccccttcctgcacccgtaccccccaaacaccattgtcacactccagtggtctttgaataaagtctgagtgggcggc

SEQ ID NO: 1101 - DNA, 1829 bp, synthetic construct
  misc_feature 1..1829: note = hIL12AB_022
  source 1..1829: mol_type = other DNA
tcaagcttttggaccctcgtacagaagctaatacgactcactatagggaaataagagagaaaagaagagtaagaagaaatataagagccaccatgtgccatcagcagctggtgatcagctggttcagcctggtgttcctcgcctctcccctggtggccatctgggagctcaaaaaggacgtgtacgtggtggagctcgactggtacccagacgcccccggggagatggtggtgctgacctgcgacacccccgaagaagacggcatcacgtggaccctcgaccagtccagcgaggtgctggggagcgggaagactctgaccatccaggtcaaggagttcggggacgccgggcagtacacgtgccacaagggcggcgaagtcttaagccacagcctgctcctgctgcacaagaaggaggacgggatctggtccacagacatactgaaggaccagaaggagccgaagaataaaacctttctgaggtgcgaggccaagaactattccggcaggttcacgtgctggtggcttacaacaatcagcacagacctgacgttcagcgtgaagtccagccgcggcagcagcgacccccagggggtgacctgcggcgccgccaccctgagcgccgagcgggtgcgcggggacaacaaggagtacgagtactccgtggagtgccaggaagacagcgcctgtcccgccgccgaagagagcctgcctatcgaggtcatggtagatgcagtgcataagctgaagtacgagaactatacgagcagctttttcatacgcgacatcatcaagcccgacccccccaagaacctgcagcttaagcccctgaagaatagccggcaggtggaggtctcctgggagtaccccgacacctggtcaacgccccacagctacttctccctgaccttttgtgtccaagtccagggaaagagcaagagggagaagaaagatcgggtgttcaccgacaagacctccgccacggtgatctgcaggaagaacgccagcatctccgtgagggcgcaagacaggtactactccagcagctggtccgaatgggccagcgtgccctgctccggcggcgggggcggcggcagccgaaacctacccgtggccacgccggatcccggcatgtttccctgcctgcaccacagccagaacctcctgagggccgtgtccaacatgctgcagaaggccaggcagactctggagttctacccctgcacgagcgaggagatcgatcacgaggacatcaccaaggataagaccagcactgtggaggcctgccttcccctggagctgaccaagaacgagagctgtctgaactccagggagacctcattcatcaccaacggctcctgcctggccagcaggaaaaccagcttcatgatggccttgtgtctcagctccatctacgaggacctgaagatgtatcaggtcgagttcaagacaatgaacgccaagctgctgatggaccccaaaaggcagatcttcctggaccagaacatgctggccgtcatcgacgagctgatgcaggccctgaacttcaacagcgagacggtgccccagaaaagctccctggaggagcccgacttctacaagaccaagatcaagctgtgcatcctgctgcacgccttcaggatcagggcagtgaccatcgaccgggtgatgtcataccttaacgccagctgataataggctggagcctcggtggccatgcttcttgccccttgggcctccccccagcccctcctccccttcctgcacccgtaccccccaaacaccattgtcacactccagtggtctttgaataaagtctgagtgggcggc

SEQ ID NO: 1102 - DNA, 1829 bp, synthetic construct
  misc_feature 1..1829: note = hIL12AB_023
  source 1..1829: mol_type = other DNA
tcaagcttttggaccctcgtacagaagctaatacgactcactatagggaaataagagagaaaagaagagtaagaagaaatataagagccaccatgtgccatcagcagctggtgatctcctggttcagcctggtgtttctggcctcgcccctggtcgccatctgggagctgaagaaagacgtgtacgtcgtcgaactggactggtaccccgacgcccccggggagatggtggtgctgacctgcgacacgccggaggaggacggcatcacctggaccctggatcaaagcagcgaggtgctgggcagcggcaagaccctgaccatccaagtgaaggaattcggcgatgccggccagtacacctgtcacaaagggggcgaggtgctcagccacagcctgctgctgctgcacaagaaggaggatggcatctggagcaccgatatcctgaaggaccagaaagagcccaagaacaagacgttcctgaggtgcgaggccaagaactacagcggtaggttcacgtgttggtggctgaccaccatcagcaccgacctgacgttcagcgtgaagagctccaggggcagctccgacccacagggggtgacgtgcggggccgcaaccctcagcgccgaaagggtgcggggggacaacaaggagtacgaatactccgtggagtgccaggaagattcggcctgccccgccgcggaggagagcctccccatcgaggtaatggtggacgccgtgcataagctgaagtacgagaactacaccagctcgttcttcatccgagacatcatcaaacccgacccgcccaaaaatctgcagctcaagcccctgaagaactccaggcaggtggaggtgagctgggagtaccccgacacctggtccaccccgcacagctacttctccctgacattctgcgtgcaggtgcagggcaagagcaagcgggagaagaaggacagggtgttcaccgacaagacgagcgccaccgtgatctgccgaaagaacgccagcatctcggtgcgcgcccaggataggtactattccagctcctggagcgagtgggcctcggtaccctgcagcggcggcgggggcggcggcagtaggaatctgcccgtggctaccccggacccgggcatgttcccctgcctccaccacagccagaacctgctgagggccgtgagcaacatgctgcagaaggccagacagacgctggagttctacccctgcacgagcgaggagatcgaccacgaggacatcaccaaggataaaacttccaccgtcgaggcctgcctgcccttggagctgaccaagaatgaatcctgtctgaacagcagggagacctcgtttatcaccaatggcagctgcctcgcctccaggaagaccagcttcatgatggccctctgtctgagctccatctatgaggacctgaagatgtaccaggtggagttcaagaccatgaacgcgaagctgctgatggaccccaagaggcagatcttcctggatcagaatatgctggcggtgatcgacgagctcatgcaggccctcaatttcaatagcgagacagtgccccagaagtcctccctggaggagcccgacttctacaagaccaagatcaagctgtgtatcctgctgcacgccttccggatccgggccgtcaccatcgaccgggtcatgagctacctcaatgccagctgataataggctggagcctcggtggccatgcttcttgccccttgggcctccccccagcccctcctccccttcctgcacccgtaccccccaaacaccattgtcacactccagtggtctttgaataaagtctgagtgggcggc

SEQ ID NO: 1103 - DNA, 1829 bp, synthetic construct
  misc_feature 1..1829: note = hIL12AB_024
  source 1..1829: mol_type = other DNA
tcaagcttttggaccctcgtacagaagctaatacgactcactatagggaaataagagagaaaagaagagtaagaagaaatataagagccaccatgtgccaccagcagctggtgatctcctggttctccctggtgttcctggcctcgcccctggtggccatctgggagctgaagaaggacgtgtacgtcgtggagctcgactggtaccccgacgcccctggcgagatggtggtgctgacctgcgacaccccagaggaggatggcatcacctggaccctggatcagtcctccgaggtgctgggctccggcaagacgctgaccatccaagtgaaggagttcggtgacgccggacagtatacctgccataagggcggcgaggtcctgtcccacagcctcctcctcctgcataagaaggaggacggcatctggagcaccgacatcctgaaggaccagaaggagcccaagaacaagacctttctgaggtgcgaggccaagaactacagcggccgattcacctgctggtggctcaccaccatatccaccgacctgactttctccgtcaagtcctcccgggggtccagcgacccccagggagtgacctgcggcgccgccaccctcagcgccgagcgggtgcggggggacaacaaggagtacgaatactccgtcgagtgccaggaggactccgcctgcccggccgccgaggagagcctgcccatcgaggtgatggtcgacgcggtgcacaagctgaagtacgagaactacaccagcagtttcttcatcagggatatcatcaagccagatcccccgaagaatctgcaactgaagccgctgaaaaactcacgacaggtggaggtgagctgggagtaccccgacacgtggagcaccccacattcctacttcagcctgaccttctgcgtgcaggtccagggcaagagcaagcgggagaagaaggacagggtgttcacggataagaccagtgccaccgtgatctgcaggaagaacgcctctattagcgtgagggcccaggatcggtattactcctcgagctggagcgaatgggcctccgtgccctgcagtggggggggtggaggcgggagcaggaacctgcccgtagcaacccccgaccccgggatgttcccctgtctgcaccactcgcagaacctgctgcgcgcggtgagcaacatgctccaaaaagcccgtcagaccttagagttctacccctgcaccagcgaagaaatcgaccacgaagacatcaccaaggacaaaaccagcaccgtggaggcgtgcctgccgctggagctgaccaagaacgagagctgcctcaactccagggagaccagctttatcaccaacggctcgtgcctagccagccggaaaaccagcttcatgatggccctgtgcctgagctccatttacgaggacctgaagatgtatcaggtggagttcaagaccatgaatgccaaactcctgatggaccccaagaggcagatcttcctggaccagaacatgctcgcggtgatcgatgagctgatgcaggccctgaactttaatagcgagaccgtgccccagaaaagcagcctggaggagccggacttctacaagaccaaaatcaagctgtgcatcctgctccacgccttccgcatccgggccgtgaccatcgacagggtgatgagctacctgaacgccagctgataataggctggagcctcggtggccatgcttcttgccccttgggcctccccccagcccctcctccccttcctgcacccgtaccccccaaacaccattgtcacactccagtggtctttgaataaagtctgagtgggcggc

SEQ ID NO: 1104 - DNA, 1829 bp, synthetic construct
  misc_feature 1..1829: note = hIL12AB_025
  source 1..1829: mol_type = other DNA
tcaagcttttggaccctcgtacagaagctaatacgactcactatagggaaataagagagaaaagaagagtaagaagaaatataagagccaccatgtgccatcagcagctggtgatttcctggttctccctggtgttcctggccagccccctcgtggcgatctgggagctaaagaaggacgtgtacgtggtggagctggactggtacccggacgcacccggcgagatggtcgttctgacctgcgatacgccagaggaggacggcatcacctggaccctcgatcagagcagcgaggtcctggggagcggaaagaccctgaccatccaggtcaaggagttcggcgacgccggccagtacacctgccacaaaggtggcgaggtcctgagccactcgctgctgctcctgcataagaaggaggacggaatctggagcacagacatcctgaaagaccagaaggagcccaagaacaagaccttcctgaggtgcgaggccaagaactacagcgggcgcttcacgtgctggtggctgaccaccatcagcacggacctcaccttctccgtgaagagcagccggggatccagcgatccccaaggcgtcacctgcggcgcggccaccctgagcgcggagagggtcaggggcgataataaggagtatgagtacagcgtggagtgccaggaggacagcgcctgcccggccgccgaggagtccctgccaatcgaagtgatggtcgacgccgtgcacaagctgaagtacgagaactacaccagcagcttcttcatccgggatatcatcaagcccgatcccccgaagaacctgcagctgaagcccctcaagaacagccggcaggtggaggtgagttgggagtaccccgacacctggtcaacgccccacagctacttctccctgaccttctgtgtgcaggtgcagggaaagagcaagagggagaagaaagaccgggtcttcaccgacaagaccagcgccacggtgatctgcaggaagaacgcaagcatctccgtgagggcccaggacaggtactacagctccagctggtccgaatgggccagcgtgccctgtagcggcggcgggggcggtggcagccgcaacctcccagtggccacccccgaccccggcatgttcccctgcctgcaccacagccagaatctgctgagggccgtgagtaacatgctgcagaaggcaaggcaaaccctcgaattctatccctgcacctccgaggagatcgaccacgaggatatcaccaaggacaagaccagcaccgtcgaggcctgtctccccctggagctgaccaagaatgagagctgcctgaacagccgggagaccagcttcatcaccaacgggagctgcctggcctccaggaagacctcgttcatgatggcgctgtgcctctcaagcatatacgaggatctgaagatgtaccaggtggagtttaagacgatgaacgccaagctgctgatggacccgaagaggcagatcttcctggaccagaacatgctggccgtgatagacgagctcatgcaggccctgaacttcaactccgagaccgtgccgcagaagtcatccctcgaggagcccgacttctataagaccaagatcaagctgtgcatcctgctccacgccttccggataagggccgtgacgatcgacagggtgatgagctaccttaacgccagctgataataggctggagcctcggtggccatgcttcttgccccttgggcctccccccagcccctcctccccttcctgcacccgtaccccccaaacaccattgtcacactccagtggtctttgaataaagtctgagtgggcggc

SEQ ID NO: 1105 - DNA, 1829 bp, synthetic construct
  misc_feature 1..1829: note = hIL12AB_026
  source 1..1829: mol_type = other DNA
tcaagcttttggaccctcgtacagaagctaatacgactcactatagggaaataagagagaaaagaagagtaagaagaaatataagagccaccatgtgccaccagcagctcgtgatcagctggttctccctggtgtttctcgccagccccctggtggccatctgggagctgaagaaggacgtgtacgtggtggagctggactggtaccctgacgccccgggggagatggtcgtgctgacctgcgacacccccgaagaggacggtatcacctggaccctggaccagtccagcgaggtgctgggcagcggcaagaccctgactattcaagtcaaggagttcggagacgccggccagtacacctgccacaagggtggagaggtgttatcacacagcctgctgctgctgcacaagaaggaagacgggatctggagcaccgacatcctgaaggaccagaaggagcccaaaaacaagaccttcctgcggtgcgaggccaagaactattcgggccgctttacgtgctggtggctgaccaccatcagcactgatctcaccttcagcgtgaagtcctcccgggggtcgtccgacccccagggggtgacctgcggggccgccaccctgtccgccgagagagtgaggggcgataataaggagtacgagtacagcgttgagtgccaggaagatagcgcctgtcccgccgccgaggagagcctgcccatcgaggtgatggtggacgccgtccacaagctgaagtatgagaactacacctcaagcttcttcatcagggacatcatcaaacccgatccgcccaagaatctgcagctgaagcccctgaaaaatagcaggcaggtggaggtgagctgggagtaccccgacacctggtccaccccccatagctatttctccctgacgttctgcgtgcaggtgcaagggaagagcaagcgggagaagaaggaccgggtgttcaccgacaagacctccgccaccgtgatctgtaggaagaacgcgtcgatctcggtcagggcccaggacaggtattacagcagcagctggagcgagtgggcgagcgtgccctgctcgggcggcggcggcggcgggagcagaaatctgcccgtggccaccccagaccccggaatgttcccctgcctgcaccattcgcagaacctcctgagggccgtgagcaacatgctgcagaaggcccgccagacgctggagttctacccctgcacgagcgaggagatcgaccacgaagacatcaccaaggacaaaaccagcaccgtggaggcctgcctgcccctggagctgaccaaaaacgaatcctgcctcaacagccgggagaccagcttcatcaccaacggcagctgcctggccagccgaaagacctccttcatgatggccctctgcctgagcagcatctatgaggatctgaagatgtatcaggtggagttcaagaccatgaatgccaagctgctgatggaccccaagaggcagatattcctggaccagaatatgctggccgtgatcgacgagctgatgcaggccctgaacttcaacagcgagaccgtcccccagaagtccagcctggaggagccggacttttacaaaacgaagatcaagctgtgcatactgctgcacgccttcaggatccgggccgtgacaatcgacagggtgatgtcctacctgaacgccagctgataataggctggagcctcggtggccatgcttcttgccccttgggcctccccccagcccctcctccccttcctgcacccgtaccccccaaacaccattgtcacactccagtggtctttgaataaagtctgagtgggcggc

SEQ ID NO: 1106 - DNA, 1829 bp, synthetic construct
  misc_feature 1..1829: note = hIL12AB_027
  source 1..1829: mol_type = other DNA
tcaagcttttggaccctcgtacagaagctaatacgactcactatagggaaataagagagaaaagaagagtaagaagaaatataagagccaccatgtgtcaccagcagctggtgatcagctggttctccctggtgttcctggccagccccctggtggccatctgggagctcaagaaggacgtctacgtcgtggagctggattggtaccccgacgctcccggggagatggtggtgctgacctgcgacacccccgaggaggacggcatcacctggacgctggaccagagctcagaggtgctgggaagcggaaagacactgaccatccaggtgaaggagttcggggatgccgggcagtatacctgccacaagggcggcgaagtgctgagccattccctgctgctgctgcacaagaaggaggacggcatatggtccaccgacatcctgaaggatcagaaggagccgaagaataaaaccttcctgaggtgcgaggccaagaattacagcggccgattcacctgctggtggctgaccaccatcagcaccgacctgaccttcagtgtgaagtcctcacggggcagctcagatccccagggcgtgacctgcggggccgcgacactcagcgccgagcgggtgaggggtgataacaaggagtacgagtattctgtggagtgccaggaagactccgcctgtcccgccgccgaggagtccctgcccatcgaggtgatggtggacgccgtgcataaactgaagtacgagaactacacctccagcttcttcatccgggatataatcaagcccgaccctccgaaaaacctgcagctgaagccccttaaaaacagccggcaggtggaggtgagctgggagtaccccgacacctggagcaccccccatagctatttcagcctgaccttctgcgtgcaggtgcaggggaagtccaagcgcgagaaaaaggaccgggtgttcaccgacaagacgagcgccaccgtgatctgccggaagaacgccagtataagcgtaagggcccaggataggtactacagctccagctggtcggagtgggcctccgtgccctgttccggcggcggggggggtggcagcaggaacctccccgtggccacgccggaccccggcatgttcccgtgcctgcaccactcccaaaacctcctgcgggccgtcagcaacatgctgcaaaaggcgcggcagaccctggagttttacccctgtacctccgaagagatcgaccacgaggatatcaccaaggataagacctccaccgtggaggcctgtctccccctggagctgaccaagaacgagagctgtcttaacagcagagagacctcgttcataacgaacggctcctgcctcgcttccaggaagacgtcgttcatgatggcgctgtgcctgtccagcatctacgaggacctgaagatgtatcaggtcgagttcaaaaccatgaacgccaagctgctgatggaccccaagaggcagatcttcctggaccagaacatgctcgccgtgatcgacgagctgatgcaggccctgaacttcaacagcgaaaccgtgccccagaagtcaagcctggaggagccggacttctataagaccaagatcaagctgtgtatcctgctacacgcttttcgtatccgggccgtgaccatcgacagggttatgtcgtacttgaacgccagctgataataggctggagcctcggtggccatgcttcttgccccttgggcctccccccagcccctcctccccttcctgcacccgtaccccccaaacaccattgtcacactccagtggtctttgaataaagtctgagtgggcggc

SEQ ID NO: 1107 - DNA, 1829 bp, synthetic construct
  misc_feature 1..1829: note = hIL12AB_028
  source 1..1829: mol_type = other DNA
tcaagcttttggaccctcgtacagaagctaatacgactcactatagggaaataagagagaaaagaagagtaagaagaaatataagagccaccatgtgccaccaacagctcgtgatcagctggttcagcctggtgttcctggccagcccgctggtggccatctgggagctgaagaaggacgtgtacgtggtggagctggactggtaccccgacgcccccggcgagatggtggtcctgacctgcgacacgccggaagaggacggcatcacctggaccctggatcagtccagcgaggtgctgggctccggcaagaccctgaccattcaggtgaaggagttcggcgacgccggtcagtacacctgccacaagggcggcgaggtgctgagccacagcctactgctcctgcacaaaaaggaggatggaatctggtccaccgacatcctcaaggaccagaaggagccgaagaacaagacgttcctccggtgcgaggccaagaactacagcggcaggtttacctgctggtggctgaccaccatcagcaccgacctgacattttccgtgaagagcagccgcggcagcagcgatccccagggcgtgacctgcggggcggccaccctgtccgccgagcgtgtgaggggcgacaacaaggagtacgagtacagcgtggaatgccaggaggacagcgcctgtcccgccgccgaggagagcctgccaatcgaggtcatggtggacgccgtgcacaagctgaagtacgagaactacacgagcagcttcttcatcagggacatcatcaaaccggacccgcccaagaacctgcagctgaaacccttgaaaaacagcaggcaggtggaagtgtcttgggagtaccccgacacctggtccaccccccacagctactttagcctgaccttctgtgtgcaggtccagggcaagtccaagagggagaagaaggacagggtgttcaccgacaaaaccagcgccaccgtgatctgcaggaagaacgcctccatcagcgtgcgggcccaggacaggtattacagctcgtcgtggagcgagtgggccagcgtgccctgctccgggggaggcggcggcggaagccggaatctgcccgtggccacccccgatcccggcatgttcccgtgtctgcaccacagccagaacctgctgcgggccgtgagcaacatgctgcagaaggcccgccaaaccctggagttctacccctgtacaagcgaggagatcgaccatgaggacattaccaaggacaagaccagcaccgtggaggcctgcctgcccctcgagctcacaaagaacgaatcctgcctgaatagccgcgagaccagctttatcacgaacgggtcctgcctcgccagccggaagacaagcttcatgatggccctgtgcctgagcagcatctacgaggacctgaaaatgtaccaagtggagttcaaaacgatgaacgccaagctgctgatggaccccaagcgccagatcttcctggaccagaacatgctggccgtcatcgacgagctcatgcaggccctgaacttcaacagcgagaccgtgccccagaagagcagcctggaggagcccgacttctacaagacgaagatcaagctctgcatcctgctgcacgctttccgcatccgcgcggtgaccatcgaccgggtgatgagctacctcaacgccagttgataataggctggagcctcggtggccatgcttcttgccccttgggcctccccccagcccctcctccccttcctgcacccgtaccccccaaacaccattgtcacactccagtggtctttgaataaagtctgagtgggcggc

SEQ ID NO: 1108 - DNA, 1829 bp, synthetic construct
  misc_feature 1..1829: note = hIL12AB_029
  source 1..1829: mol_type = other DNA
tcaagcttttggaccctcgtacagaagctaatacgactcactatagggaaataagagagaaaagaagagtaagaagaaatataagagccaccatgtgccaccaacagctggtgatcagctggttcagcctggtgtttctggcctcccctctggtggccatctgggagctgaagaaggacgtgtacgtggtggagctggactggtaccctgacgcccccggcgaaatggtggtgctgacgtgcgacacccccgaggaggatggcatcacctggaccctggaccaaagcagcgaggtcctcggaagcggcaagaccctcactatccaagtgaaggagttcggggatgcgggccagtacacctgccacaagggcggcgaggtgctgtctcatagcctgctgctcctgcataagaaggaagacggcatctggagcaccgacatactgaaggatcagaaggagcccaagaacaagaccttcctgaggtgcgaggccaagaactactccgggcgcttcacctgttggtggctgaccaccatctccaccgacctgaccttcagcgtgaagagcagcagggggagcagcgacccccagggggtgacctgcggagccgcgaccttgtcggccgagcgggtgaggggcgacaataaggagtacgagtactcggtcgaatgccaggaggactccgcctgccccgccgccgaggagtccctccccatcgaagtgatggtggacgccgtccacaagctgaagtacgagaactacaccagcagcttcttcatacgggatatcatcaagcccgaccccccgaagaacctgcagctgaaacccttgaagaactccaggcaggtggaggtgagctgggagtaccccgacacctggtccaccccgcactcatacttcagcctgaccttctgtgtacaggtccagggcaagagcaagagggaaaagaaggatagggtgttcaccgacaagacctccgccacggtgatctgtcggaaaaacgccagcatctccgtgcgggcccaggacaggtactattccagcagctggagcgagtgggcctccgtcccctgctccggcggcggtggcgggggcagcaggaacctccccgtggccacccccgatcccgggatgttcccatgcctgcaccacagccaaaacctgctgagggccgtctccaatatgctgcagaaggcgaggcagaccctggagttctacccctgtacctccgaggagatcgaccacgaggatatcaccaaggacaagacctccacggtcgaggcgtgcctgcccctggagctcacgaagaacgagagctgccttaactccagggaaacctcgtttatcacgaacggcagctgcctggcgtcacggaagacctcctttatgatggccctatgtctgtcctcgatctacgaggacctgaagatgtaccaggtggagttcaagaccatgaacgccaagctgctgatggatcccaagaggcagattttcctggaccagaacatgctggccgtgattgacgagctgatgcaggcgctgaacttcaacagcgagacagtgccgcagaagagctccctggaggagccggacttttacaagaccaagataaagctgtgcatcctgctccacgccttcagaatacgggccgtcaccatcgatagggtgatgtcttacctgaacgcctcctgataataggctggagcctcggtggccatgcttcttgccccttgggcctccccccagcccctcctccccttcctgcacccgtaccccccaaacaccattgtcacactccagtggtctttgaataaagtctgagtgggcggc

SEQ ID NO: 1109 - DNA, 1829 bp, synthetic construct
  misc_feature 1..1829: note = hIL12AB_030
  source 1..1829: mol_type = other DNA
tcaagcttttggaccctcgtacagaagctaatacgactcactatagggaaataagagagaaaagaagagtaagaagaaatataagagccaccatgtgccaccagcagctggtgattagctggtttagcctggtgttcctggcaagccccctggtggccatctgggaactgaaaaaggacgtgtacgtggtcgagctggattggtaccccgacgcccccggcgaaatggtggtgctgacgtgtgatacccccgaggaggacgggatcacctggaccctggatcagagcagcgaggtgctggggagcgggaagaccctgacgatccaggtcaaggagttcggcgacgctgggcagtacacctgtcacaagggcggggaggtgctgtcccactccctgctgctcctgcataagaaagaggacggcatctggtccaccgacatcctcaaggaccagaaggagcccaagaacaagaccttcctgcggtgtgaggcgaagaactacagcggccgtttcacctgctggtggctgacgacaatcagcaccgacttgacgttctccgtgaagtcctccagaggcagctccgacccccaaggggtgacgtgcggcgcggccaccctgagcgccgagcgggtgcggggggacaacaaggagtacgagtactccgtggagtgccaggaggacagcgcctgtcccgcagccgaggagtccctgcccatcgaagtcatggtggacgccgtccacaagctgaagtacgagaactacaccagcagcttcttcatccgcgatatcatcaagcccgatccccccaaaaacctgcaactgaagccgctgaagaatagcaggcaggtggaggtgtcctgggagtacccggacacctggagcacgccccacagctatttcagcctgaccttttgcgtgcaggtccaggggaagagcaagcgggagaagaaggaccgcgtgtttacggacaaaaccagcgccaccgtgatctgcaggaagaacgccagcatcagcgtgagggcccaggacaggtactacagcagctcctggagcgagtgggcctccgtgccctgttccggaggcggcgggggcggttcccggaacctcccggtggccacccccgacccgggcatgttcccgtgcctgcaccactcacagaatctgctgagggccgtgagcaatatgctgcagaaggcaaggcagaccctggagttttatccctgcaccagcgaggagatcgaccacgaagacatcaccaaggacaagaccagcacagtggaggcctgcctgcccctggaactgaccaagaacgagtcctgtctgaactcccgggaaaccagcttcataaccaacggctcctgtctcgccagcaggaagaccagcttcatgatggccctgtgcctcagctccatctacgaggacctcaagatgtaccaggttgagttcaagaccatgaacgccaagctcctgatggaccccaagaggcagatcttcctggaccagaatatgctggccgtgatcgatgagttaatgcaggcgctgaacttcaacagcgagacggtgccccaaaagtcctcgctggaggagcccgacttctacaagaccaagatcaagctgtgcatcctcctgcacgccttccgaatccgggccgtaaccatcgacagggtgatgagctatctcaacgcctcctgataataggctggagcctcggtggccatgcttcttgccccttgggcctccccccagcccctcctccccttcctgcacccgtaccccccaaacaccattgtcacactccagtggtctttgaataaagtctgagtgggcggc

SEQ ID NO: 1110 - DNA, 1829 bp, synthetic construct
  misc_feature 1..1829: note = hIL12AB_031
  source 1..1829: mol_type = other DNA
tcaagcttttggaccctcgtacagaagctaatacgactcactatagggaaataagagagaaaagaagagtaagaagaaatataagagccaccatgtgccaccagcagctcgtgatcagctggttctcgcttgtgttcctggcctcccccctcgtcgccatctgggagctgaagaaagacgtgtacgtggtggagctggactggtatcccgacgccccgggggagatggtggtgctgacctgcgacaccccggaagaggacggcatcacctggacgctcgaccagtcgtccgaagtgctggggtcgggcaagaccctcaccatccaggtgaaggagttcggagacgccggccagtacacctgtcataaggggggggaggtgctgagccacagcctcctgctcctgcacaaaaaggaggacggcatctggagcaccgatatcctcaaggaccagaaggagcccaagaacaagacgttcctgaggtgtgaggccaagaactacagcgggcggttcacgtgttggtggctcaccaccatctccaccgacctcaccttctccgtgaagtcaagcaggggcagctccgacccccaaggcgtcacctgcggcgccgccaccctgagcgccgagagggtcaggggggataacaaggaatacgagtacagtgtggagtgccaagaggatagcgcctgtcccgccgccgaagagagcctgcccatcgaagtgatggtggacgccgtgcacaagctgaagtacgagaactacacctccagcttcttcatcagggatatcatcaagcccgatccccccaagaacctgcagctgaagcccctgaagaacagcaggcaggtggaggtgagctgggagtatcccgacacgtggagcaccccgcacagctacttctcgctgaccttctgcgtgcaggtgcaagggaagtccaagagggagaagaaggatagggtgttcaccgacaaaacgagcgccaccgtgatctgccggaagaatgccagcatctctgtgagggcccaggacaggtactattccagctcctggtcggagtgggccagcgtgccctgtagcggcgggggcgggggcggcagcaggaacctcccggttgccacccccgaccccggcatgtttccgtgcctgcaccactcgcaaaacctgctgcgcgcggtctccaacatgctgcaaaaagcgcgccagacgctggagttctacccctgcaccagcgaggagatcgatcatgaagatatcaccaaagacaagacctcgaccgtggaggcctgcctgcccctggagctcaccaagaacgaaagctgcctgaacagcagggagacaagcttcatcaccaacggcagctgcctggcctcccggaagaccagcttcatgatggccctgtgcctgtccagcatctacgaggatctgaagatgtaccaagtggagtttaagaccatgaacgccaagctgttaatggaccccaaaaggcagatcttcctggatcagaacatgctggccgtcatcgacgagctgatgcaagccctgaacttcaacagcgagacggtgccccagaagagcagcctcgaggagcccgacttctataagaccaagataaagctgtgcattctgctgcacgccttcagaatcagggccgtgaccatcgatagggtgatgagctacctgaacgccagctgataataggctggagcctcggtggccatgcttcttgccccttgggcctccccccagcccctcctccccttcctgcacccgtaccccccaaacaccattgtcacactccagtggtctttgaataaagtctgagtgggcggc

SEQ ID NO: 1111 - DNA, 1829 bp, synthetic construct
  misc_feature 1..1829: note = hIL12AB_032
  source 1..1829: mol_type = other DNA
tcaagcttttggaccctcgtacagaagctaatacgactcactatagggaaataagagagaaaagaagagtaagaagaaatataagagccaccatgtgtcaccagcagctggtgatttcctggttcagtctggtgtttcttgccagccccctggtggccatctgggagctgaagaaagacgtatacgtcgtggagctggactggtatcccgacgctcccggcgagatggtggtcctcacctgcgacaccccagaggaggacggcatcacctggaccctggaccagagctccgaggtcctgggcagcggtaagaccctcaccatccaggtgaaggagtttggtgatgccgggcagtatacctgccacaagggcggcgaggtgctgtcccacagcctcctgttactgcataagaaggaggatggcatctggagcaccgacatcctcaaggaccagaaagagcccaagaacaagacctttctgcggtgcgaggcgaaaaattactccggccggttcacctgctggtggctgaccaccatcagcacggacctgacgttctccgtgaagtcgagcagggggagctccgatccccagggcgtgacctgcggcgcggccaccctgagcgccgagcgcgtccgcggggacaataaggaatacgaatatagcgtggagtgccaggaggacagcgcctgccccgcggccgaggagagcctcccgatcgaggtgatggtggatgccgtccacaagctcaaatacgaaaactacaccagcagcttcttcattagggacatcatcaagcccgacccccccaaaaacctgcagctgaagcccctgaagaacagccgccaggtcgaggtgtcatgggagtacccagacacctggagcaccccccactcctacttcagcctgaccttctgcgtccaggtgcagggaaagtccaaacgggagaagaaggatagggtctttaccgataagacgtcggccaccgtcatctgcaggaagaacgccagcataagcgtgcgggcgcaggatcggtactacagctcgagctggtccgaatgggcctccgtgccctgtagcggagggggtggcgggggcagcaggaacctgcccgtggccaccccggacccgggcatgtttccctgcctgcatcacagtcagaacctgctgagggccgtgagcaacatgctccagaaggcccgccagaccctggagttttacccctgcaccagcgaagagatcgatcacgaagacatcaccaaagacaagacctccaccgtggaggcctgtctgcccctggagctgaccaagaacgagagctgtctgaacagcagggagacctccttcatcaccaacggctcctgcctggcatcccggaagaccagcttcatgatggccctgtgtctgagctctatctacgaggacctgaagatgtaccaggtcgagttcaagaccatgaacgccaagctgctgatggaccccaagcgacagatattcctggaccagaacatgctcgccgtgatcgatgaactgatgcaagccctgaacttcaatagcgagaccgtgccccagaaaagcagcctggaggagcccgacttctacaagaccaagatcaaactgtgcatactgctgcacgcgttcaggatccgggccgtcaccatcgaccgggtgatgtcctatctgaatgccagctgataataggctggagcctcggtggccatgcttcttgccccttgggcctccccccagcccctcctccccttcctgcacccgtaccccccaaacaccattgtcacactccagtggtctttgaataaagtctgagtgggcggc

SEQ ID NO: 1112 - DNA, 1829 bp, synthetic construct
  misc_feature 1..1829: note = hIL12AB_033
  source 1..1829: mol_type = other DNA
tcaagcttttggaccctcgtacagaagctaatacgactcactatagggaaataagagagaaaagaagagtaagaagaaatataagagccaccatgtgccaccagcagctcgtgattagctggttttcgctggtgttcctggccagccctctcgtggccatctgggagctgaaaaaagacgtgtacgtggtggagctggactggtacccggacgcccccggcgagatggtggtgctgacgtgcgacaccccggaagaggacggcatcacctggaccctggaccagtcatccgaggtcctgggcagcggcaagacgctcaccatccaggtgaaggagttcggcgacgccggccagtacacatgccataagggcggggaggtgctgagccacagcctgctcctcctgcacaagaaggaggatggcatctggtctacagacatcctgaaggaccagaaagagcccaagaacaagaccttcctccggtgcgaggccaagaactactccgggcggtttacttgttggtggctgaccaccatcagcaccgacctcaccttcagcgtgaagagctcccgagggagctccgacccccagggggtcacctgcggcgccgccaccctgagcgccgagcgggtgaggggcgacaacaaggagtatgaatacagcgtggaatgccaagaggacagcgcctgtcccgcggccgaggaaagcctgcccatcgaggtgatggtggacgccgtccacaaactcaagtacgagaactacaccagcagtttcttcattcgcgacatcatcaagccggacccccccaaaaacctgcagctcaaacccctgaagaacagcaggcaggtggaggtcagctgggagtacccggacacctggagcaccccccatagctacttcagcctgaccttctgcgtgcaggtgcagggcaagagcaaacgcgagaagaaggaccgggtgtttaccgacaagaccagcgccacggtgatctgccgaaagaatgcaagcatctccgtgagggcgcaggaccgctactactctagcagctggagcgagtgggccagcgtgccctgcagcggtggcggcggaggcggcagccgtaacctccccgtggccacccccgaccccggcatgttcccgtgtctgcaccactcccagaacctgctgagggccgtcagcaatatgctgcagaaggcccggcagacgctggagttctacccctgcacctccgaggagatcgaccatgaggacattaccaaggacaagacgagcactgtggaggcctgcctgcccctggagctcaccaaaaacgagagctgcctgaatagcagggagacgtccttcatcaccaacggcagctgtctggccagcaggaagaccagcttcatgatggccctgtgcctctcctccatatatgaggatctgaagatgtaccaggtggagttcaagaccatgaacgccaagctgctgatggatcccaagaggcagatcttcctggaccagaatatgctggccgtgattgacgagctgatgcaggccctgaactttaatagcgagaccgtcccccagaagagcagcctggaggagcccgacttctataagaccaagatcaagctgtgcatactgctgcacgcgtttaggataagggccgtcaccatcgacagggtgatgagctacctgaatgccagctgataataggctggagcctcggtggccatgcttcttgccccttgggcctccccccagcccctcctccccttcctgcacccgtaccccccaaacaccattgtcacactccagtggtctttgaataaagtctgagtgggcggc

SEQ ID NO: 1113 - DNA, 1829 bp, synthetic construct
  misc_feature 1..1829: note = hIL12AB_034
  source 1..1829: mol_type = other DNA
tcaagcttttggaccctcgtacagaagctaatacgactcactatagggaaataagagagaaaagaagagtaagaagaaatataagagccaccatgtgccaccaacagctggtgatctcctggttcagcctggtgttcctcgccagccccctggtggccatctgggagctgaagaaagacgtgtacgtggtggagctggactggtatcccgacgcccccggcgagatggtcgtgctgacctgcgacaccccggaggaggacggcatcacctggaccctggatcagtcctccgaggtgctgggcagcgggaagaccctgaccatccaggtgaaagagttcggagatgccggccagtatacctgtcacaaggggggtgaggtgctgagccatagcctcttgcttctgcacaagaaggaggacggcatctggtccaccgacatcctcaaggaccaaaaggagccgaagaataaaacgttcctgaggtgcgaagccaagaactattccggacggttcacctgctggtggctgaccaccatcagcaccgacctcaccttctccgtaaagtcaagcaggggcagctccgacccccagggcgtgacctgcggagccgccaccctgagcgcagagagggtgaggggcgacaacaaggagtacgaatactccgtcgagtgccaggaggacagcgcctgccccgccgccgaggaaagtctgcccatcgaggtgatggtggacgccgtgcacaagctcaaatacgagaactacaccagcagcttcttcatccgggatatcatcaagcccgaccctccaaagaatctgcagctgaaaccccttaagaacagcaggcaggtggaggtcagctgggagtaccccgacacctggagcacgccccactcctactttagcctgaccttttgcgtgcaggtgcaggggaaaagcaagcgggagaagaaggacagggtgttcaccgataagacctccgctaccgtgatctgcaggaagaacgcctcaatcagcgtgagggcccaggatcggtactactccagctcctggagcgagtgggccagcgtgccctgctctggcggtggcggcgggggcagccggaacctgccggtggccactcccgacccgggcatgttcccgtgcctccaccattcccagaacctgctgcgggccgtgtccaatatgctccagaaggcaaggcagaccctggagttctacccctgcaccagcgaggagatcgatcacgaggacatcaccaaagacaaaaccagcacggtcgaggcctgcctgcccctggaactcaccaagaacgaaagctgtctcaacagccgcgagaccagcttcataaccaacggttcctgtctggcctcccgcaagaccagctttatgatggccctctgtctgagctccatctatgaagacctgaaaatgtaccaggtggagttcaaaaccatgaacgccaagcttctgatggaccccaagaggcagatcttcctggatcagaacatgctggccgtgatcgacgagctgatgcaggccctgaactttaactccgagaccgtgccccagaaaagcagcctggaagagcccgatttctacaaaacgaagatcaagctgtgcatcctgctgcacgccttccggatccgtgcggtgaccatcgatagggtgatgagctacctgaacgccagctgataataggctggagcctcggtggccatgcttcttgccccttgggcctccccccagcccctcctccccttcctgcacccgtaccccccaaacaccattgtcacactccagtggtctttgaataaagtctgagtgggcggc

SEQ ID NO: 1114 - DNA, 1829 bp, synthetic construct
  misc_feature 1..1829: note = hIL12AB_035
  source 1..1829: mol_type = other DNA
tcaagcttttggaccctcgtacagaagctaatacgactcactatagggaaataagagagaaaagaagagtaagaagaaatataagagccaccatgtgccaccaacagctggtaatcagctggttcagcctggttttcctcgcgtcgcccctggtggccatctgggagttaaagaaggacgtgtacgtggtggagctggattggtaccccgacgccccgggcgagatggtcgtgctcacctgcgatacccccgaggaggacgggatcacctggaccctggaccaatccagcgaggtgctgggcagcggcaagaccctgaccatacaggtgaaggaatttggggacgccgggcagtacacctgccacaagggcggggaagtgctgtcccactccctcctgctgctgcataagaaggaggacggcatctggagcaccgacatcctgaaggaccaaaaggagcccaagaacaagaccttcctgaggtgcgaggccaaaaactattccggccgctttacctgttggtggctgaccaccatctccaccgatctgaccttcagcgtgaagtcgtctaggggctcctccgacccccagggcgtaacctgcggcgccgcgaccctgagcgccgagagggtgcggggcgataacaaagagtacgagtactcggtggagtgccaggaggacagcgcctgtccggcggccgaggagagcctgcccatcgaggtgatggtggacgccgtccacaagctgaagtacgagaactacaccagttcgttcttcatcagggacatcatcaagccggacccccccaagaacctccagctgaagcccctgaagaacagcaggcaggtggaagtgtcctgggagtatcccgacacctggagcaccccccacagctacttcagcctgaccttttgcgtgcaggtgcagggcaaaagcaagagggaaaagaaggaccgggtgttcaccgataagacgagcgccaccgttatctgcaggaagaacgcctccataagcgtgagggcgcaggaccgttactacagcagcagctggagtgagtgggcaagcgtgccctgtagcggcgggggcgggggcgggtcccgcaacctccccgtcgccacccccgacccaggcatgtttccgtgcctgcaccacagccagaacctgctgcgggccgttagcaacatgctgcagaaggccaggcagaccctcgagttctatccctgcacatctgaggagatcgaccacgaagacatcactaaggataagacctccaccgtggaggcctgtctgcccctcgagctgaccaagaatgaatcctgcctgaacagccgagagaccagctttatcaccaacggctcctgcctggccagcaggaagacctccttcatgatggccctgtgcctctccagcatctacgaggatctgaagatgtaccaggtagagttcaagacgatgaacgccaagctcctgatggaccccaagaggcagatattcctggaccagaacatgctggcggtgatcgacgagctgatgcaggccctgaatttcaacagcgagacggtgccacagaagtccagcctggaggagccagacttctacaagaccaagatcaaactgtgcatcctcctgcacgcgttcaggatccgcgccgtcaccatagacagggtgatgagttatctgaacgccagctgataataggctggagcctcggtggccatgcttcttgccccttgggcctccccccagcccctcctccccttcctgcacccgtaccccccaaacaccattgtcacactccagtggtctttgaataaagtctgagtgggcggc

SEQ ID NO: 1115 - DNA, 1829 bp, synthetic construct
  misc_feature 1..1829: note = hIL12AB_036
  source 1..1829: mol_type = other DNA
tcaagcttttggaccctcgtacagaagctaatacgactcactatagggaaataagagagaaaagaagagtaagaagaaatataagagccaccatgtgccatcagcagctggtaatcagctggtttagcctggtgttcctggccagcccactggtggccatctgggagctgaagaaggacgtgtacgtggtggaactggactggtaccccgacgcccctggcgagatggtggtactgacctgtgacaccccggaggaagacggtatcacctggaccctggatcagagctccgaggtgctgggctccggcaagacactgaccatccaagttaaggaatttggggacgccggccagtacacctgccacaaggggggcgaggtgctgtcccactccctgctgcttctgcataagaaggaggatggcatctggtccaccgacatactgaaggaccagaaggagcccaagaataagaccttcctgagatgcgaggccaagaactactcgggaaggttcacctgctggtggctgaccaccatcagcaccgacctgaccttctccgtgaagagctcccggggcagctccgacccccagggcgtaacctgtggggccgctaccctgtccgccgagagggtccggggcgacaacaaggaatacgagtacagcgtggagtgccaggaggactccgcctgccccgccgccgaggagtcgctgcccatagaggtgatggtggacgccgtgcacaagctcaagtacgagaattacaccagcagcttctttatcagggacataattaagccggaccccccaaagaatctgcagctgaagcccctgaagaatagccggcaggtggaagtgtcctgggagtaccccgacacctggagcaccccccactcctatttctcactgacattctgcgtgcaggtgcaagggaaaagcaagagggagaagaaggatagggtgttcaccgacaagacaagcgccaccgtgatctgccgaaaaaatgccagcatcagcgtgagggcccaggatcggtattacagcagctcctggagcgagtgggccagcgtgccctgttccggcgggggagggggcggctcccggaacctgccggtggccacccccgaccctggcatgttcccctgcctgcatcacagccagaacctgctccgggccgtgtcgaacatgctgcagaaggcccggcagaccctcgagttttacccctgcaccagcgaagagatcgaccacgaagacataaccaaggacaagaccagcacggtggaggcctgcctgcccctggagcttaccaaaaacgagtcctgcctgaacagccgggaaaccagcttcataacgaacgggagctgcctggcctccaggaagaccagcttcatgatggcgctgtgtctgtccagcatatacgaggatctgaagatgtatcaggtggaattcaaaactatgaatgccaagctcctgatggaccccaagaggcagatcttcctggaccagaacatgctagccgtgatcgacgagctgatgcaggccctcaacttcaactcggagacggtgccccagaagtccagcctcgaggagcccgacttctacaagaccaagatcaagctgtgcatactgctgcatgccttcaggataagggcggtgactatcgacagggtcatgtcctacctgaacgccagctgataataggctggagcctcggtggccatgcttcttgccccttgggcctccccccagcccctcctccccttcctgcacccgtaccccccaaacaccattgtcacactccagtggtctttgaataaagtctgagtgggcggc

SEQ ID NO: 1116 - DNA, 1829 bp, synthetic construct
  misc_feature 1..1829: note = hIL12AB_037
  source 1..1829: mol_type = other DNA
tcaagcttttggaccctcgtacagaagctaatacgactcactatagggaaataagagagaaaagaagagtaagaagaaatataagagccaccatgtgccaccaacaactggtgatcagctggttctccctggtgttcctggccagccccctggtggccatctgggagctcaaaaaagacgtgtacgtggtggagctcgattggtacccagacgcgccgggggaaatggtggtgctgacctgcgacaccccagaggaggatggcatcacgtggacgctggatcagtccagcgaggtgctggggagcggcaagacgctcaccatccaggtgaaggaatttggcgacgcgggccagtatacctgtcacaagggcggcgaggtgctgagccactccctgctgctgctgcacaagaaggaggatgggatctggtcaaccgatatcctgaaagaccagaaggagcccaagaacaagaccttcctgcgctgcgaggccaagaactatagcggcaggttcacctgctggtggctgaccaccatcagcaccgacctgaccttcagcgtgaaatcctccaggggcagcagcgacccccagggcgtgacctgcggtgccgccacgctctccgccgagcgagtgaggggtgacaacaaggagtacgagtacagcgtggaatgtcaggaggacagcgcctgtcccgccgccgaggagtcgctgcccatcgaggtgatggtcgacgcggtgcacaagctcaaatacgagaattacaccagcagcttcttcatcagggacatcatcaagcccgacccccccaagaacctgcagctgaagcccttgaagaacagcaggcaggtggaggtgagctgggagtacccggacacctggagcaccccccactcctacttcagcctgacgttctgtgtgcaggtgcaggggaagtccaagagggagaagaaggaccgggtgttcaccgacaagaccagcgccaccgtgatatgccgcaagaacgcgtccatcagcgttcgcgcccaggaccgctactacagcagctcctggtccgaatgggccagcgtgccctgcagcggtggagggggcgggggctccaggaatctgccggtggccacccccgaccccgggatgttcccgtgtctgcatcactcccagaacctgctgcgggccgtgagcaatatgctgcagaaggccaggcagacgctcgagttctacccctgcacctccgaagagatcgaccatgaggacatcaccaaggacaagaccagcaccgtggaggcctgcctccccctggagctgaccaaaaacgagagctgcctgaactccagggagaccagctttataaccaacggcagctgcctcgcctccaggaagacctcgtttatgatggccctctgcctgtccagcatctacgaggacctgaagatgtaccaggtggagttcaagaccatgaacgcgaagttgctcatggaccccaagaggcagatcttcctggaccagaacatgctcgcggtgatcgacgagctgatgcaagccctgaacttcaacagcgagaccgtgccccagaagagcagcctggaagagcccgacttctacaagaccaagatcaagctgtgcatcctgctgcacgccttccggatccgggccgtgaccatcgacagggtgatgagctacctcaacgcctcctgataataggctggagcctcggtggccatgcttcttgccccttgggcctccccccagcccctcctccccttcctgcacccgtaccccccaaacaccattgtcacactccagtggtctttgaataaagtctgagtgggcggc

SEQ ID NO: 1117 - DNA, 1829 bp, synthetic construct
  misc_feature 1..1829: note = hIL12AB_038
  source 1..1829: mol_type = other DNA
tcaagcttttggaccctcgtacagaagctaatacgactcactatagggaaataagagagaaaagaagagtaagaagaaatataagagccaccatgtgccaccagcagctcgtgatcagctggttctccctcgtcttcctggcctccccgctggtggccatctgggagctgaagaaggacgtgtacgtggtggagctggactggtatcccgacgcccccggcgagatggtggtgctgacgtgcgacacaccagaagaggacgggatcacatggaccctggatcagtcgtccgaggtgctggggagcggcaagaccctcaccatccaagtgaaggagttcggggacgccggccagtacacctgccacaagggcggggaggtgctctcccatagcctgctcctcctgcacaaaaaggaggatggcatctggagcaccgacatcctgaaggaccagaaggagcccaagaacaagacatttctcaggtgtgaggccaagaactattcgggcaggtttacctgttggtggctcaccaccatctctaccgacctgacgttctccgtcaagtcaagcagggggagctcggacccccagggggtgacatgtggggccgccaccctgagcgcggagcgtgtccgcggcgacaacaaggagtacgagtattccgtggagtgccaggaggacagcgcctgccccgccgccgaggagtccctgcccatagaggtgatggtggacgccgtccacaagttgaagtacgaaaattatacctcctcgttcttcattagggacatcatcaagcctgaccccccgaagaacctacaactcaagcccctcaagaactcccgccaggtggaggtgtcctgggagtaccccgacacctggtccaccccgcacagctacttcagcctgaccttctgcgtgcaggtccaggggaagagcaagcgtgaaaagaaagacagggtgttcaccgacaagacgagcgccaccgtgatctgcaggaaaaacgcctccatctccgtgcgcgcccaggacaggtactacagtagctcctggagcgaatgggccagcgtgccgtgcagcggcgggggaggaggcggcagtcgcaacctgcccgtggccacccccgaccccggcatgttcccatgcctgcaccacagccagaacctgctgagggcagtcagcaatatgctgcagaaggccaggcagaccctggagttttatccctgcaccagcgaggagatcgaccacgaggacatcaccaaggacaagacctccaccgtcgaggcctgcctgccactggagctgaccaaaaacgagagctgcctgaactccagggagacctccttcatcaccaacgggagctgcctggccagccggaagaccagcttcatgatggcgctgtgcctcagcagcatctacgaggatctcaagatgtaccaggtggagttcaagaccatgaacgcgaagctgctgatggaccccaagcggcagatcttcctggaccagaacatgctggccgtgattgacgagctcatgcaggccctgaacttcaatagcgagaccgtcccccaaaagagcagcctggaggaacccgacttctacaaaacgaagatcaagctctgcatcctgctgcacgccttccggatccgggccgtgaccatcgatcgtgtgatgagctacctgaacgcctcgtgataataggctggagcctcggtggccatgcttcttgccccttgggcctccccccagcccctcctccccttcctgcacccgtaccccccaaacaccattgtcacactccagtggtctttgaataaagtctgagtgggcggc

SEQ ID NO: 1118 - DNA, 1829 bp, synthetic construct
  misc_feature 1..1829: note = hIL12AB_039
  source 1..1829: mol_type = other DNA
tcaagcttttggaccctcgtacagaagctaatacgactcactatagggaaataagagagaaaagaagagtaagaagaaatataagagccaccatgtgccaccagcagctcgtcatctcctggtttagcctggtgtttctggcctcccccctggtcgccatctgggagctgaagaaagacgtgtacgtggtggagctggactggtacccggacgctcccggggagatggtggtgctgacctgcgacacccccgaggaggacggcatcacctggaccctggaccagagctccgaggtgctggggagcggcaagaccctgaccattcaggtgaaagagttcggcgacgccggccaatatacctgccacaaggggggggaggtcctgtcgcattccctgctgctgcttcacaaaaaggaggatggcatctggagcaccgacatcctgaaggaccagaaagaacccaagaacaagacgttcctgcgctgcgaggccaagaactacagcggccggttcacctgttggtggctgaccaccatctccaccgacctgactttctcggtgaagagcagccgcgggagcagcgacccccagggagtgacctgcggcgccgccaccctgagcgccgaaagggtgaggggcgacaataaagagtacgagtattccgtggagtgccaggaggacagcgcctgtcccgccgccgaggagtccctgcctatcgaggtgatggtcgacgcggtgcacaagctcaagtacgaaaactacaccagcagctttttcatcagggatatcatcaaaccagacccccccaagaacctgcagctgaagcccctgaaaaacagcaggcaggtggaagtgagctgggaataccccgatacctggtccaccccccacagctacttcagcctgaccttctgcgtgcaggtgcaggggaagtccaagcgggagaagaaagatcgggtgttcacggacaagaccagcgccaccgtgatttgcaggaaaaacgccagcatctccgtgagggctcaggacaggtactacagctccagctggagcgagtgggcctccgtgccttgcagcgggggaggaggcggcggcagcaggaatctgcccgtcgcaacccccgaccccggcatgttcccctgcctgcaccacagccagaatctgctgcgagccgtgagcaacatgctccagaaggcccggcagacgctggagttctacccctgcacctccgaggagatcgaccacgaggacatcaccaaggataagacgagcaccgtcgaggcctgtctccccctggagctcaccaagaacgagtcctgcctgaatagcagggagacgtccttcataaccaacggcagctgtctggcgtccaggaagaccagcttcatgatggccctctgcctgagctccatctacgaggacctcaagatgtaccaggtcgagttcaagaccatgaacgcaaaactgctcatggatccaaagaggcagatctttctggaccagaacatgctggccgtgatcgatgaactcatgcaggccctgaatttcaattccgagaccgtgccccagaagagctccctggaggaacccgacttctacaaaacaaagatcaagctgtgtatcctcctgcacgccttccggatcagggccgtcaccattgaccgggtgatgtcctacctgaacgccagctgataataggctggagcctcggtggccatgcttcttgccccttgggcctccccccagcccctcctccccttcctgcacccgtaccccccaaacaccattgtcacactccagtggtctttgaataaagtctgagtgggcggc

SEQ ID NO: 1119 - DNA, 1829 bp, synthetic construct
  misc_feature 1..1829: note = hIL12AB_040
  source 1..1829: mol_type = other DNA
tcaagcttttggaccctcgtacagaagctaatacgactcactatagggaaataagagagaaaagaagagtaagaagaaatataagagccaccatgtgccatcagcagctggtgatcagctggttcagcctcgtgttcctcgccagccccctcgtggccatctgggagctgaaaaaggacgtgtacgtggtggagctggactggtatcccgacgccccgggcgagatggtggtgctgacctgcgacacccccgaggaggacggcattacctggacactggaccagagcagcgaggtcctgggcagcgggaagaccctgacaattcaggtgaaggagttcggcgacgccggacagtacacgtgccacaaggggggggaggtgctgtcccacagcctcctcctgctgcacaagaaggaggatggcatctggagcaccgacatcctgaaggatcagaaggagcccaagaacaagacctttctgagatgcgaggccaagaattacagcggccgtttcacctgctggtggctcaccaccatcagcaccgacctgaccttcagcgtgaaatcctccaggggctcctccgacccgcagggagtgacctgcggcgccgccacactgagcgccgagcgggtcagaggggacaacaaggagtacgagtacagcgttgagtgccaggaggacagcgcctgtcccgcggccgaggaatccctgcccatcgaggtgatggtggacgcagtgcacaagctgaagtacgagaactatacctcgagcttcttcatccgggatatcattaagcccgatcccccgaagaacctgcagctcaaacccctgaagaacagcaggcaggtggaggtctcctgggagtaccccgacacatggtccaccccccattcctatttctccctgaccttttgcgtgcaggtgcagggcaagagcaagagggagaaaaaggacagggtgttcaccgacaagacctccgccaccgtgatctgccgtaagaacgctagcatcagcgtcagggcccaggacaggtactatagcagctcctggtccgagtgggccagcgtcccgtgcagcggcgggggcggtggaggctcccggaacctccccgtggccaccccggaccccgggatgtttccctgcctgcatcacagccagaacctgctgagggccgtgtccaacatgctgcagaaggccaggcagacactcgagttttacccctgcaccagcgaggagatcgaccacgaagacatcaccaaggacaagacctccaccgtggaggcatgcctgcccctggagctgaccaaaaacgaaagctgtctgaactccagggagacctcctttatcacgaacggctcatgcctggcctccagaaagaccagcttcatgatggccctgtgcctgagctccatctacgaggacttgaaaatgtaccaggtcgagttcaagaccatgaacgccaagctgctcatggaccccaaaaggcagatctttctggaccagaatatgctggccgtgatcgacgagctcatgcaagccctgaatttcaacagcgagaccgtgccccagaagtcctccctggaggagcccgacttctacaagaccaagatcaagctgtgcatactcctgcacgcgtttaggatcagggcggtgaccatcgatagggtgatgagctacctgaatgcctcctgataataggctggagcctcggtggccatgcttcttgccccttgggcctccccccagcccctcctccccttcctgcacccgtaccccccaaacaccattgtcacactccagtggtctttgaataaagtctgagtgggcggc

SEQ ID NO: 1120 - RNA, 1890 nt, synthetic construct
  misc_feature 1..1890: note = hIL12AB_001
  modified_base 1: mod_base = m7g
  misc_feature 1..2: note = 5  to 5  triphosphate linkage
  source 1..1890: mol_type = other RNA
ggggaaataagagagaaaagaagagtaagaagaaatataagagccaccatgtgtcaccagcagctggtcattagctggtttagccttgtgttcctggcctccccccttgtcgctatttgggagctcaagaaggacgtgtacgtggtggagttggattggtacccagacgcgcccggagagatggtagttctgacctgtgataccccagaggaggacggcatcacctggacgctggaccaaagcagcgaggttttgggctcagggaaaacgctgaccatccaggtgaaggaattcggcgacgccgggcagtacacctgccataagggaggagaggtgctgagccattcccttcttctgctgcacaagaaagaggacggcatctggtctaccgacatcctgaaagaccagaaggagcccaagaacaaaaccttcctgaggtgcgaggccaagaactactccggcaggttcacttgttggtggctgaccaccatcagtacagacctgacttttagtgtaaaaagctccagaggctcgtccgatccccaaggggtgacctgcggcgcagccactctgagcgctgagcgcgtgcgcggtgacaataaagagtacgagtacagcgttgagtgtcaagaagatagcgcttgccctgccgccgaggagagcctgcctatcgaggtgatggttgacgcagtgcacaagcttaagtacgagaattacaccagctcattcttcattagagatataatcaagcctgacccacccaagaacctgcagctgaagccactgaaaaactcacggcaggtcgaagtgagctgggagtaccccgacacctggagcactcctcattcctatttctctcttacattctgcgtccaggtgcagggcaagagcaagcgggaaaagaaggatcgagtcttcaccgacaaaacaagcgcgaccgtgatttgcaggaagaacgccagcatctccgtcagagcccaggatagatactatagtagcagctggagcgagtgggcaagcgtgccctgttccggcggcgggggcgggggcagccgaaacttgcctgtcgctaccccggaccctggaatgtttccgtgtctgcaccacagccagaacctgctgagagccgtgtcgaatatgctccagaaggcccggcagacccttgagttctacccctgtaccagcgaagagatcgatcatgaagatatcacgaaagataaaacatccaccgtcgaggcttgtctcccgctggagctgaccaagaacgagagctgtctgaatagccgggagacgtctttcatcacgaatggtagctgtctggccagcaggaaaacttccttcatgatggctctctgcctgagctctatctatgaagatctgaagatgtatcaggtggagtttaaaacaatgaacgccaaactcctgatggacccaaaaaggcaaatctttctggaccagaatatgctggccgtgatagacgagctgatgcaggcactgaacttcaacagcgagacggtgccacagaaatccagcctggaggagcctgacttttacaaaactaagatcaagctgtgtatcctgctgcacgcctttagaatccgtgccgtgactatcgacagggtgatgtcatacctcaacgcttcatgataataggctggagcctcggtggccatgcttcttgccccttgggcctccccccagcccctcctccccttcctgcacccgtaccccccaaacaccattgtcacactccagtggtctttgaataaagtctgagtgggcggcaaaaaaaaaaaaaaaaaaaaaaaaaaaaaaaaaaaaaaaaaaaaaaaaaaaaaaaaaaaaaaaaaaaaaaaaaaaaaaaaaaaaaaaaaaaaaaaaaaaatctag

SEQ ID NO: 1121 - RNA, 1890 nt, synthetic construct
  misc_feature 1..1890: note = hIL12AB_002
  modified_base 1: mod_base = m7g
  misc_feature 1..2: note = 5  to 5  triphosphate linkage
  source 1..1890: mol_type = other RNA
ggggaaataagagagaaaagaagagtaagaagaaatataagagccaccatgtgccaccagcagctggtgatcagctggttcagcctggtgttcctggccagccccctggtggccatctgggagctgaagaaggacgtgtacgtggtggagttggattggtaccccgacgcccccggcgagatggtggtgctgacctgcgacacccccgaggaggacggcatcacctggaccctggaccagagcagcgaggtgctgggcagcggcaagaccctgaccatccaggtgaaggagttcggcgacgccggccagtacacctgccacaagggcggcgaggtgctgagccacagcctgctgctgctgcacaagaaggaggacggcatctggagcaccgacatcctgaaggaccagaaggagcccaagaacaagaccttcctgagatgcgaggccaagaactacagcggcagattcacctgctggtggctgaccaccatcagcaccgacctgaccttcagcgtgaagagcagcagaggcagcagcgacccccagggcgtgacctgcggcgccgccaccctgagcgccgagagagtgagaggcgacaacaaggagtacgagtacagcgtggagtgccaggaagatagcgcctgccccgccgccgaggagagcctgcccatcgaggtgatggtggacgccgtgcacaagctgaagtacgagaactacaccagcagcttcttcatcagagatatcatcaagcccgacccccccaagaacctgcagctgaagcccctgaagaacagccggcaggtggaggtgagctgggagtaccccgacacctggagcaccccccacagctacttcagcctgaccttctgcgtgcaggtgcagggcaagagcaagagagagaagaaagatagagtgttcaccgacaagaccagcgccaccgtgatctgcagaaagaacgccagcatcagcgtgagagcccaagatagatactacagcagcagctggagcgagtgggccagcgtgccctgcagcggcggcggcggcggcggcagcagaaacctgcccgtggccacccccgaccccggcatgttcccctgcctgcaccacagccagaacctgctgagagccgtgagcaacatgctgcagaaggcccggcagaccctggagttctacccctgcaccagcgaggagatcgaccacgaagatatcaccaaagataagaccagcaccgtggaggcctgcctgcccctggagctgaccaagaacgagagctgcctgaacagcagagagaccagcttcatcaccaacggcagctgcctggccagcagaaagaccagcttcatgatggccctgtgcctgagcagcatctacgaggacctgaagatgtaccaggtggagttcaagaccatgaacgccaagctgctgatggaccccaagcggcagatcttcctggaccagaacatgctggccgtgatcgacgagctgatgcaggccctgaacttcaacagcgagaccgtgccccagaagagcagcctggaggagcccgacttctacaagaccaagatcaagctgtgcatcctgctgcacgccttcagaatcagagccgtgaccatcgacagagtgatgagctacctgaacgccagctgataataggctggagcctcggtggccatgcttcttgccccttgggcctccccccagcccctcctccccttcctgcacccgtaccccccaaacaccattgtcacactccagtggtctttgaataaagtctgagtgggcggcaaaaaaaaaaaaaaaaaaaaaaaaaaaaaaaaaaaaaaaaaaaaaaaaaaaaaaaaaaaaaaaaaaaaaaaaaaaaaaaaaaaaaaaaaaaaaaaaaaaatctag

SEQ ID NO: 1122 - RNA, 1890 nt, synthetic construct
  misc_feature 1..1890: note = hIL12AB_003
  modified_base 1: mod_base = m7g
  misc_feature 1..2: note = 5  to 5  triphosphate linkage
  source 1..1890: mol_type = other RNA
ggggaaataagagagaaaagaagagtaagaagaaatataagagccaccatgtgtcaccagcagttggtcatctcttggttttccctggtttttctggcatctcccctcgtggccatctgggaactgaagaaagacgtttacgttgtagaattggattggtatccggacgctcctggagaaatggtggtcctcacctgtgacacccctgaagaagacggaatcacctggaccttggaccagagcagtgaggtcttaggctctggcaaaaccctgaccatccaagtcaaagagtttggagatgctggccagtacacctgtcacaaaggaggcgaggttctaagccattcgctcctgctgcttcacaaaaaggaagatggaatttggtccactgatattttaaaggaccagaaagaacccaaaaataagacctttctaagatgcgaggccaagaattattctggacgtttcacctgctggtggctgacgacaatcagtactgatttgacattcagtgtcaaaagcagcagaggctcttctgacccccaaggggtgacgtgcggagctgctacactctctgcagagagagtcagaggtgacaacaaggagtatgagtactcagtggagtgccaggaagatagtgcctgcccagctgctgaggagagtctgcccattgaggtcatggtggatgccgttcacaagctcaagtatgaaaactacaccagcagcttcttcatcagagatatcatcaaacctgacccacccaagaacttgcagctgaagccattaaagaattctcggcaggtggaggtcagctgggagtaccctgacacctggagtactccacattcctacttctccctgacattctgcgttcaggtccagggcaagagcaagagagaaaagaaagatagagtcttcacagataagacctcagccacggtcatctgccgcaaaaatgccagcattagcgtgcgggcccaggaccgctactatagctcatcttggagcgaatgggcatctgtgccctgcagtggcggagggggcggagggagcagaaacctccccgtggccactccagacccaggaatgttcccatgccttcaccactcccaaaacctgctgagggccgtcagcaacatgctccagaaggcccggcaaactttagaattttacccttgcacttctgaagagattgatcatgaagatatcacaaaagataaaaccagcacagtggaggcctgtttaccattggaattaaccaagaatgagagttgcctaaattccagagagacctctttcataactaatgggagttgcctggcctccagaaagacctcttttatgatggccctgtgccttagtagtatttatgaagatttgaagatgtaccaggtggagttcaagaccatgaatgcaaagcttctgatggatcctaagaggcagatctttttagatcaaaacatgctggcagttattgatgagctgatgcaggccctgaatttcaacagtgagacggtgccacaaaaatcctcccttgaagaaccagatttctacaagaccaagatcaagctctgcatacttcttcatgctttcagaattcgggcagtgactattgatagagtgatgagctatctgaatgcttcctgataataggctggagcctcggtggccatgcttcttgccccttgggcctccccccagcccctcctccccttcctgcacccgtaccccccaaacaccattgtcacactccagtggtctttgaataaagtctgagtgggcggcaaaaaaaaaaaaaaaaaaaaaaaaaaaaaaaaaaaaaaaaaaaaaaaaaaaaaaaaaaaaaaaaaaaaaaaaaaaaaaaaaaaaaaaaaaaaaaaaaaaatctag

SEQ ID NO: 1123 - RNA, 1890 nt, synthetic construct
  misc_feature 1..1890: note = hIL12AB_005
  modified_base 1: mod_base = m7g
  misc_feature 1..2: note = 5  to 5  triphosphate linkage
  source 1..1890: mol_type = other RNA
ggggaaataagagagaaaagaagagtaagaagaaatataagagccaccatgtgccaccagcagctggtcatcagctggttctccctggtcttcctggccagccccctggtggccatctgggagctgaagaaagacgtctacgtagtagagttggattggtacccagacgcacctggagaaatggtggttctcacctgtgacacgccagaagaagacggtatcacctggacgctggaccagagctcagaagttcttggcagtggaaaaacgctgaccatacaagtaaaagaatttggggatgctggccagtacacctgccacaaaggaggagaagttctcagccacagcctgctgctgctgcacaagaaagaagatggcatctggagcacagatattttaaaagaccagaaggagcccaagaacaaaaccttccttcgatgtgaggccaagaactacagtggccgcttcacctgctggtggctcaccaccatcagcacagacctcaccttctcggtgaagagcagccgtggcagctcagacccccaaggagtcacctgtggggcggccacgctgtcggcagaaagagttcgaggtgacaacaaggaatatgaatactcggtggaatgtcaagaagattcggcctgcccggcggcagaagaaagtcttcccatagaagtcatggtggatgctgttcacaaattaaaatatgaaaactacaccagcagcttcttcatcagagatatcatcaagccagacccgcccaagaacctgcagctgaagcccctgaagaacagccggcaggtggaagtttcctgggagtacccagatacgtggagcacgccgcacagctacttcagcctcaccttctgtgtacaagtacaaggcaagagcaagagagagaagaaagatcgtgtcttcacagataaaacctcggcgacggtcatctgcaggaagaatgcctccatctcggttcgagcccaggaccgctactacagcagcagctggagtgagtgggcctcggtgccctgcagtggtggcggcggcggcggcagcagaaaccttcctgtggccacgccggaccctggcatgttcccgtgcctgcaccacagccaaaatttacttcgagctgtttctaacatgctgcagaaagcacggcaaactttagaattctacccctgcacctcagaagaaatagaccatgaagatatcaccaaagataaaaccagcactgtagaggcctgcctgcccctggagctcaccaagaatgaatcctgcctcaacagcagagagaccagcttcatcaccaatggcagctgcctggccagcaggaaaaccagcttcatgatggcgctctgcctgagcagcatctatgaagatttgaagatgtaccaagtagaatttaaaaccatgaatgccaagctgctcatggaccccaagcggcagatatttttggatcaaaacatgctggctgtcattgatgagctcatgcaagcattaaacttcaactcagagacggtgccccagaagagcagcctggaggagccagatttctacaaaaccaagatcaagctctgcatcttattacatgccttccgcatccgggcggtcaccattgaccgtgtcatgtcctacttaaatgccagctgataataggctggagcctcggtggccatgcttcttgccccttgggcctccccccagcccctcctccccttcctgcacccgtaccccccaaacaccattgtcacactccagtggtctttgaataaagtctgagtgggcggcaaaaaaaaaaaaaaaaaaaaaaaaaaaaaaaaaaaaaaaaaaaaaaaaaaaaaaaaaaaaaaaaaaaaaaaaaaaaaaaaaaaaaaaaaaaaaaaaaaaatctag

SEQ ID NO: 1124 - RNA, 1890 nt, synthetic construct
  misc_feature 1..1890: note = hIL12AB_006
  modified_base 1: mod_base = m7g
  misc_feature 1..2: note = 5  to 5  triphosphate linkage
  source 1..1890: mol_type = other RNA
ggggaaataagagagaaaagaagagtaagaagaaatataagagccaccatgtgccaccagcagctggtgatcagctggttcagcctggtgttcctggccagccccctggtggccatctgggagctgaagaaggacgtgtacgtggtggagttggattggtaccccgacgcccccggcgagatggtggtgctgacctgtgacacccccgaggaggacggcatcacctggaccctggaccagagcagcgaggtgctgggcagcggcaagaccctgaccatccaggtgaaggagttcggggacgccggccagtacacctgccacaagggcggcgaggtgctgagccacagcctgctgctgctgcacaagaaggaggacggcatctggagcacagatatcctgaaggaccagaaggagcccaagaacaagaccttcctgagatgcgaggccaagaactacagcggcagattcacctgctggtggctgaccaccatcagcacagatttgaccttcagcgtgaagagcagcagaggcagcagcgacccccagggcgtgacctgcggcgccgccaccctgagcgccgagagagtgagaggtgacaacaaggagtacgagtacagcgtggagtgccaggaagatagcgcctgccccgccgccgaggagagcctgcccatcgaggtgatggtggacgccgtgcacaagctgaagtacgagaactacaccagcagcttcttcatcagagatatcatcaagcccgacccgccgaagaacctgcagctgaagcccctgaagaacagccggcaggtggaggtgagctgggagtaccccgacacctggagcaccccccacagctacttcagcctgaccttctgcgtgcaggtgcagggcaagagcaagagagagaagaaagatagagtgttcacagataagaccagcgccaccgtgatctgcagaaagaacgccagcatcagcgtgagagcccaagatagatactacagcagcagctggagcgagtgggccagcgtgccctgcagcggcggcggcggcggcggcagcagaaacctgcccgtggccacccccgaccccggcatgttcccctgcctgcaccacagccagaacctgctgagagccgtgagcaacatgctgcagaaggcccggcagaccctggagttctacccctgcaccagcgaggagatcgaccacgaagatatcaccaaagataagaccagcaccgtggaggcctgcctgcccctggagctgaccaagaatgaaagctgcctgaacagcagagagaccagcttcatcaccaacggcagctgcctggccagcagaaagaccagcttcatgatggccctgtgcctgagcagcatctacgaggacctgaagatgtaccaggtggagttcaagaccatgaacgccaagctgctgatggaccccaagcggcagatcttcctggaccagaacatgctggccgtgatcgacgagctgatgcaggccctgaacttcaacagcgagaccgtgccccagaagagcagcctggaggagcccgacttctacaagaccaagatcaagctgtgcatcctgctgcacgccttcagaatcagagccgtgaccatcgacagagtgatgagctacctgaacgccagctgataataggctggagcctcggtggccatgcttcttgccccttgggcctccccccagcccctcctccccttcctgcacccgtaccccccaaacaccattgtcacactccagtggtctttgaataaagtctgagtgggcggcaaaaaaaaaaaaaaaaaaaaaaaaaaaaaaaaaaaaaaaaaaaaaaaaaaaaaaaaaaaaaaaaaaaaaaaaaaaaaaaaaaaaaaaaaaaaaaaaaaaatctag

SEQ ID NO: 1125 - RNA, 1890 nt, synthetic construct
  misc_feature 1..1890: note = hIL12AB_007
  modified_base 1: mod_base = m7g
  misc_feature 1..2: note = 5  to 5  triphosphate linkage
  source 1..1890: mol_type = other RNA
ggggaaataagagagaaaagaagagtaagaagaaatataagagccaccatgtgccaccagcagcttgtcatctcctggttctctcttgtcttccttgcttctcctcttgtggccatctgggagctgaagaaggacgtttacgtagtggagttggattggtaccctgacgcacctggagaaatggtggttctcacctgtgacactcctgaggaggacggtatcacctggacgttggaccagtcttctgaggttcttggcagtggaaaaactcttactattcaggtgaaggagtttggagatgctggccagtacacctgccacaagggtggtgaagttctcagccacagtttacttcttcttcacaagaaggaggatggcatctggtctactgacattttaaaagaccagaaggagcccaagaacaaaacattccttcgttgtgaagccaagaactacagtggtcgtttcacctgctggtggcttactactatttctactgaccttactttctctgtgaagtcttctcgtggctcttctgaccctcagggtgtcacctgtggggctgctactctttctgctgagcgtgtgcgtggtgacaacaaggagtatgaatactcggtggagtgccaggaagattctgcctgccctgctgctgaggagtctcttcctattgaggtgatggtggatgctgtgcacaagttaaaatatgaaaactacacttcttctttcttcattcgtgacattataaaacctgaccctcccaagaaccttcagttaaaacctttaaaaaactctcgtcaggtggaggtgtcctgggagtaccctgacacgtggtctactcctcactcctacttctctcttactttctgtgtccaggtgcagggcaagtccaagcgtgagaagaaggaccgtgtcttcactgacaaaacatctgctactgtcatctgcaggaagaatgcatccatctctgtgcgtgctcaggaccgttactacagctcttcctggtctgagtgggcttctgtgccctgctctggcggcggcggcggcggcagcagaaatcttcctgtggctactcctgaccctggcatgttcccctgccttcaccactcgcagaaccttcttcgtgctgtgagcaacatgcttcagaaggctcgtcaaactttagaattctacccctgcacttctgaggagattgaccatgaagatatcaccaaagataaaacatctactgtggaggcctgccttcctttagagctgaccaagaatgaatcctgcttaaattctcgtgagacgtctttcatcaccaatggcagctgccttgcctcgcgcaaaacatctttcatgatggctctttgcctttcttccatctatgaagatttaaaaatgtaccaggtggagttcaagaccatgaatgcaaagcttctcatggaccccaagcgtcagatatttttggaccagaacatgcttgctgtcattgatgagctcatgcaggctttaaacttcaactctgagacggtgcctcagaagtcttctttagaagagcctgacttctacaagaccaagataaaactttgcattcttcttcatgctttccgcatccgtgctgtgactattgaccgtgtgatgtcctacttaaatgcttcttgataataggctggagcctcggtggccaagcttcttgccccttgggcctccccccagcccctcctccccttcctgcacccgtaccccccaaacaccattgtcacactccagtggtctttgaataaagtctgagtgggcggcaaaaaaaaaaaaaaaaaaaaaaaaaaaaaaaaaaaaaaaaaaaaaaaaaaaaaaaaaaaaaaaaaaaaaaaaaaaaaaaaaaaaaaaaaaaaaaaaaaaatctag

SEQ ID NO: 1126 - RNA, 1890 nt, synthetic construct
  misc_feature 1..1890: note = hIL12AB_008
  modified_base 1: mod_base = m7g
  misc_feature 1..2: note = 5  to 5  triphosphate linkage
  source 1..1890: mol_type = other RNA
ggggaaataagagagaaaagaagagtaagaagaaatataagagccaccatgtgtcatcaacaactcgtgattagctggttcagtctcgtgttcctggcctctccgctggtggccatctgggagcttaagaaggacgtgtacgtggtggagctcgattggtaccccgacgcacctggcgagatggtggtgctaacctgcgatacccccgaggaggacgggatcacttggaccctggatcagagtagcgaagtcctgggctctggcaaaacactcacaatccaggtgaaggaattcggagacgctggtcagtacacttgccacaaggggggtgaagtgctgtctcacagcctgctgttactgcacaagaaggaggatgggatctggtcaaccgacatcctgaaggatcagaaggagcctaagaacaagacctttctgaggtgtgaagctaagaactattccggaagattcacttgctggtggttgaccacaatcagcactgacctgaccttttccgtgaagtccagcagaggaagcagcgatcctcagggcgtaacgtgcggcgcggctaccctgtcagctgagcgggttagaggcgacaacaaagagtatgagtactccgtggagtgtcaggaagatagcgcctgccccgcagccgaggagagtctgcccatcgaggtgatggtggacgctgtccataagttaaaatacgaaaattacacaagttcctttttcatccgcgatattatcaaacccgatccccccaagaacctgcagctgaagcccctgaagaatagccgacaggtggaagtctcttgggagtatcctgacacctggtccacgcctcacagctactttagtctgactttctgtgtccaggtccagggcaagagcaagagagagaaaaaggatagagtgtttactgacaaaacatctgctacagtcatctgcagaaagaacgccagtatctcagtgagggcgcaagatagatactacagtagtagctggagcgaatgggctagcgtgccctgttcagggggcggcggagggggctccaggaatctgcccgtggccacccccgaccctgggatgttcccttgcctccatcactcacagaacctgctcagagcagtgagcaacatgctccaaaaggcccgccagaccctggagttttacccttgtacttcagaagagatcgatcacgaagatataacaaaggataaaaccagcaccgtggaggcctgtctgcctctggaactcacaaagaatgaaagctgtctgaattccagggaaacctccttcattactaacggaagctgtctcgcatctcgcaaaacatcattcatgatggccctctgcctgtcttctatctatgaagatctcaagatgtatcaggtggagttcaaaacaatgaacgccaagctgctgatggaccccaagcggcagatcttcctggaccagaacatgctggcagtgatcgatgagctgatgcaagccttgaacttcaactcagagacggtgccgcaaaagtcctcgttggaggaaccagatttttacaaaaccaaaatcaagctgtgtatccttcttcacgcctttcggatcagagccgtgactatcgaccgggtgatgtcatacctgaatgcttcctgataataggctggagcctcggtggccatgcttcttgccccttgggcctccccccagcccctcctccccttcctgcacccgtaccccccaaacaccattgtcacactccagtggtctttgaataaagtctgagtgggcggcaaaaaaaaaaaaaaaaaaaaaaaaaaaaaaaaaaaaaaaaaaaaaaaaaaaaaaaaaaaaaaaaaaaaaaaaaaaaaaaaaaaaaaaaaaaaaaaaaaaatctag

SEQ ID NO: 1127 - RNA, 1890 nt, synthetic construct
  misc_feature 1..1890: note = hIL12AB_009
  modified_base 1: mod_base = m7g
  misc_feature 1..2: note = 5  to 5  triphosphate linkage
  source 1..1890: mol_type = other RNA
ggggaaataagagagaaaagaagagtaagaagaaatataagagccaccatgtgccaccagcagctggtcatcagctggtttagcctggtcttcctggccagccccctggtggccatctgggagctgaagaaagacgtctacgtagtagagttggattggtacccagacgcacctggagaaatggtggttctcacctgcgacacgccagaagaagacggtatcacctggacgctggaccagagcagcgaagtactgggcagtggaaaaacgctgaccatacaagtaaaagaatttggcgatgctggccagtacacctgccacaaaggaggagaagtactgagccacagcctgctgctgctgcacaagaaagaagatggcatctggagcaccgacattttaaaagaccagaaggagcccaagaacaaaaccttccttcgatgtgaggcgaagaactacagtggccgcttcacctgctggtggctcaccaccatcagcaccgacctcaccttctcggtgaagagcagccgtggtagctcagacccccaaggagtcacctgtggggcggccacgctgtcggcagaaagagttcgaggcgacaacaaggaatatgaatactcggtggaatgtcaagaagattcggcctgcccggcggcagaagaaagtctgcccatagaagtcatggtggatgctgttcacaaattaaaatatgaaaactacaccagcagcttcttcatcagagatatcatcaagccagacccccccaagaacctgcagctgaagcccctgaagaacagccggcaggtggaagtttcctgggagtacccagatacgtggagcacgccgcacagctacttcagcctcaccttctgtgtacaagtacaaggcaagagcaagagagagaagaaagatcgtgtcttcaccgacaaaacctcggcgacggtcatctgcaggaagaatgcaagcatctcggttcgagcccaggaccgctactacagcagcagctggagtgagtgggcctcggtgccctgcagtggtggcggcggcggcggcagcagaaaccttcctgtggccacgccggaccctggcatgtttccgtgcctgcaccacagccaaaatttattacgagctgttagcaacatgctgcagaaagcacggcaaactttagaattctacccctgcacctcagaagaaatagaccatgaagatatcaccaaagataaaaccagcactgtagaggcctgcctgcccctggagctcaccaagaacgagagctgcctcaatagcagagagaccagcttcatcaccaatggcagctgcctggccagcaggaaaaccagcttcatgatggcgctctgcctgagcagcatctatgaagatctgaagatgtaccaagtagaatttaaaaccatgaatgccaagctgctcatggaccccaagcggcagatattcctcgaccaaaacatgctggctgtcattgatgagctcatgcaagcattaaacttcaactcagagacggtgccccagaagagcagcctggaggagccagatttctacaaaaccaagatcaagctctgcatcttattacatgccttccgcatccgggcggtcaccattgaccgtgtcatgtcctacttaaatgccagctgataataggctggagcctcggtggccatgcttcttgccccttgggcctccccccagcccctcctccccttcctgcacccgtaccccccaaacaccattgtcacactccagtggtctttgaataaagtctgagtgggcggcaaaaaaaaaaaaaaaaaaaaaaaaaaaaaaaaaaaaaaaaaaaaaaaaaaaaaaaaaaaaaaaaaaaaaaaaaaaaaaaaaaaaaaaaaaaaaaaaaaaatctag

SEQ ID NO: 1128 - RNA, 1890 nt, synthetic construct
  misc_feature 1..1890: note = hIL12AB_010
  modified_base 1: mod_base = m7g
  misc_feature 1..2: note = 5  to 5  triphosphate linkage
  source 1..1890: mol_type = other RNA
ggggaaataagagagaaaagaagagtaagaagaaatataagagccaccatgtgccaccagcagcttgtcatctcctggttttctcttgtcttcctcgcttctcctcttgtggccatctgggagctgaagaaagacgtctacgtagtagagttggattggtacccggacgctcctggagaaatggtggttctcacctgcgacactcctgaagaagacggtatcacctggacgctggaccaaagcagcgaagttttaggctctggaaaaacgctgaccatacaagtaaaagaatttggcgacgctggccagtacacgtgccacaaaggaggagaagttttaagccacagtttacttcttcttcacaagaaagaagatggcatctggagtacagatattttaaaagaccagaaggagcctaagaacaaaaccttcctccgctgtgaagctaagaactacagtggtcgtttcacctgctggtggctcaccaccatctccactgacctcaccttctctgtaaaatcaagccgtggttcttctgacccccaaggagtcacctgtggggctgccacgctcagcgctgaaagagttcgaggcgacaacaaggaatatgaatattctgtggaatgtcaagaagattctgcctgcccggcggcagaagaaagtcttcccatagaagtcatggtggacgctgttcacaaattaaaatatgaaaactacaccagcagcttcttcattcgtgacatcatcaaaccagaccctcctaagaaccttcagttaaaaccgctgaagaacagccggcaggtggaagtttcctgggagtacccagatacgtggagtacgccgcactcctacttcagtttaaccttctgtgtacaagtacaaggaaaatcaaaaagagagaagaaagatcgtgtcttcactgacaaaacatctgccacggtcatctgccgtaagaacgcttccatctcggttcgagcccaggaccgctactacagcagcagctggagtgagtgggcatctgttccctgcagtggtggcggcggcggcggcagccgcaaccttcctgtggccacgccggaccctggcatgttcccgtgccttcaccactcgcaaaatcttcttcgtgctgtttctaacatgctgcagaaggcgcggcaaactttagaattctacccgtgcacttctgaagaaatagaccatgaagatatcaccaaagataaaaccagcacggtggaggcctgccttcctttagaacttactaagaacgaaagttgccttaacagccgtgagaccagcttcatcaccaatggcagctgccttgctagcaggaagaccagcttcatgatggcgctgtgcctttcttccatctatgaagatcttaagatgtaccaagtagaatttaaaaccatgaatgccaaattattaatggaccccaagcggcagatattcctcgaccaaaacatgctggctgtcattgatgagctcatgcaagcattaaacttcaactcagaaactgttccccagaagtcatctttagaagaaccagatttctacaaaacaaaaataaaactctgcattcttcttcatgccttccgcatccgtgctgtcaccattgaccgtgtcatgtcctacttaaatgcttcttgataataggctggagcctcggtggccatgcttcttgccccttgggcctccccccagcccctcctccccttcctgcacccgtaccccccaaacaccattgtcacactccagtggtctttgaataaagtctgagtgggcggcaaaaaaaaaaaaaaaaaaaaaaaaaaaaaaaaaaaaaaaaaaaaaaaaaaaaaaaaaaaaaaaaaaaaaaaaaaaaaaaaaaaaaaaaaaaaaaaaaaaatctag

SEQ ID NO: 1129 - RNA, 1890 nt, synthetic construct
  misc_feature 1..1890: note = hIL12AB_011
  modified_base 1: mod_base = m7g
  misc_feature 1..2: note = 5  to 5  triphosphate linkage
  source 1..1890: mol_type = other RNA
ggggaaataagagagaaaagaagagtaagaagaaatataagagccaccatgtgccaccagcagctggtgatcagctggttcagcctggtgttcctggccagccccctggtggccatctgggagctgaagaaggacgtgtacgtggtggagttggattggtacccggacgcgccgggggagatggtggtgctgacgtgcgacacgccggaggaggacgggatcacgtggacgctggaccagagcagcgaggtgctggggagcgggaagacgctgacgatccaggtgaaggagttcggggacgcggggcagtacacgtgccacaaggggggggaggtgctgagccacagcctgctgctgctgcacaagaaggaggacgggatctggagcacagatatcctgaaggaccagaaggagccgaagaacaagacgttcctgaggtgcgaggcgaagaactacagcgggaggttcacgtgctggtggctgacgacgatcagcacggacctgacgttcagcgtgaagagcagcagggggagcagcgacccgcagggggtgacgtgcggggcggcgacgctgagcgcggagagggtgaggggtgacaacaaggagtacgagtacagcgtggagtgccaggaagatagcgcgtgcccggcggcggaggagagcctgccgatcgaggtgatggtggacgcggtgcacaagctgaagtacgagaactacacgagcagcttcttcatcagagatatcatcaagccggacccgccgaagaacctgcagctgaagccgctgaagaacagcaggcaggtggaggtgagctgggagtacccagatacgtggagcacgccgcacagctacttcagcctgacgttctgcgtgcaggtgcaggggaagagcaagagggagaagaaagatagggtgttcacagataagacgagcgcgacggtgatctgcaggaagaacgcgagcatcagcgtgagggcgcaagataggtactacagcagcagctggagcgagtgggcgagcgtgccgtgcagcggggggggggggggggggagcaggaacctgccggtggcgacgccggacccggggatgttcccgtgcctgcaccacagccagaacctgctgagggcggtgagcaacatgctgcagaaggcgaggcagacgctggagttctacccgtgcacgagcgaggagatcgaccacgaagatatcacgaaagataagacgagcacggtggaggcgtgcctgccgctggagctgacgaagaacgagagctgcctgaacagcagggagacgagcttcatcacgaacgggagctgcctggcgagcaggaagacgagcttcatgatggcgctgtgcctgagcagcatctacgaggacctgaagatgtaccaggtggagttcaagacgatgaacgcgaagctgctgatggacccgaagaggcagatcttcctggaccagaacatgctggcggtgatcgacgagctgatgcaggcgctgaacttcaacagcgagacggtgccgcagaagagcagcctggaggagccagatttctacaagacgaagatcaagctgtgcatcctgctgcacgcgttcaggatcagggcggtgacgatcgacagggtgatgagctacctgaacgcgagctgataataggctggagcctcggtggccatgcttcttgccccttgggcctccccccagcccctcctccccttcctgcacccgtaccccccaaacaccattgtcacactccagtggtctttgaataaagtctgagtgggcggcaaaaaaaaaaaaaaaaaaaaaaaaaaaaaaaaaaaaaaaaaaaaaaaaaaaaaaaaaaaaaaaaaaaaaaaaaaaaaaaaaaaaaaaaaaaaaaaaaaaatctag

SEQ ID NO: 1130 - RNA, 1890 nt, synthetic construct
  misc_feature 1..1890: note = hIL12AB_012
  modified_base 1: mod_base = m7g
  misc_feature 1..2: note = 5  to 5  triphosphate linkage
  source 1..1890: mol_type = other RNA
ggggaaataagagagaaaagaagagtaagaagaaatataagagccaccatgtgccatcagcagctggtgatcagctggttcagcctcgtgtttctggccagccccctggtggccatttgggaactcaagaaggacgtgtacgttgtggaactcgactggtaccctgacgccccaggcgaaatggtggtcttaacctgcgacacccctgaggaggacggaatcacctggaccttggaccagagctccgaggtcctcggcagtggcaagaccctgaccatacaggtgaaagaatttggagacgcagggcaatacacatgtcacaagggcggggaggttctttctcactcccttctgcttctacataaaaaggaagacggaatttggtctaccgacatcctcaaggaccaaaaggagcctaagaataaaaccttcttacgctgtgaagctaaaaactacagcggcagattcacttgctggtggctcaccaccatttctaccgacctgaccttctcggtgaagtcttcaaggggctctagtgatccacagggagtgacatgcggggccgccacactgagcgctgaacgggtgaggggcgataacaaggagtatgaatactctgtcgagtgtcaggaggattcagcttgtcccgcagctgaagagtcactccccatagaggttatggtcgatgctgtgcataaactgaagtacgaaaactacaccagcagcttcttcattagagatattataaaacctgacccccccaagaacctgcaacttaaacccctgaaaaactctcggcaggtcgaagttagctgggagtaccctgatacttggtccaccccccactcgtacttctcactgactttctgtgtgcaggtgcagggcaagagcaagagagagaaaaaagatcgtgtattcacagataagacctctgccaccgtgatctgcagaaaaaacgcttccatcagtgtcagagcccaagaccggtactatagtagtagctggagcgagtgggcaagtgtcccctgctctggcggcggagggggcggctctcgaaacctccccgtcgctacccctgatccaggaatgttcccttgcctgcatcactcacagaatctgctgagagcggtcagcaacatgctgcagaaagctaggcaaacactggagttttatccttgtacctcagaggagatcgaccacgaggatattaccaaagataagaccagcacggtggaggcctgcttgcccctggaactgacaaagaatgaatcctgccttaatagccgtgagacctcttttataacaaacggatcctgcctggccagcaggaagacctccttcatgatggccctctgcctgtcctcaatctacgaagacctgaagatgtaccaggtggaatttaaaactatgaacgccaagctgttgatggaccccaagcggcagatctttctggatcaaaatatgctggctgtgatcgacgaactgatgcaggccctcaactttaacagcgagaccgtgccacaaaagagcagtcttgaggagcccgacttctacaagaccaagatcaagctgtgcatcctccttcatgccttcaggataagagctgtcaccatcgacagagtcatgagttacctgaatgcatcctgataataggctggagcctcggtggccatgcttcttgccccttgggcctccccccagcccctcctccccttcctgcacccgtaccccccaaacaccattgtcacactccagtggtctttgaataaagtctgagtgggcggcaaaaaaaaaaaaaaaaaaaaaaaaaaaaaaaaaaaaaaaaaaaaaaaaaaaaaaaaaaaaaaaaaaaaaaaaaaaaaaaaaaaaaaaaaaaaaaaaaaaatctag

SEQ ID NO: 1131 - RNA, 1890 nt, synthetic construct
  misc_feature 1..1890: note = hIL12AB_013
  modified_base 1: mod_base = m7g
  misc_feature 1..2: note = 5  to 5  triphosphate linkage
  source 1..1890: mol_type = other RNA
ggggaaataagagagaaaagaagagtaagaagaaatataagagccaccatgtgccaccagcagctggtcatctcctggttcagtcttgtcttcctggcctcgccgctggtggccatctgggagctgaagaaagacgtttacgtagtagagttggattggtacccagacgcacctggagaaatggtggtcctcacctgtgacacgccagaagaagacggtatcacctggacgctggaccagagcagtgaagttcttggaagtggaaaaacgctgaccatacaagtaaaagaatttggagatgctggccagtacacctgccacaaaggaggagaagttctcagccacagtttattattacttcacaagaaagaagatggcatctggtccacagatattttaaaagaccagaaggagcccaaaaataaaacatttcttcgatgtgaggccaagaactacagtggtcgtttcacctgctggtggctgaccaccatctccacagacctcaccttcagtgtaaaaagcagccgtggttcttctgacccccaaggagtcacctgtggggctgccacgctctctgcagaaagagttcgaggtgacaacaaagaatatgagtactcggtggaatgtcaagaagattcggcctgcccagctgctgaggagagtcttcccatagaagtcatggtggatgctgttcacaaattaaaatatgaaaactacaccagcagcttcttcatcagagatatcatcaaacctgacccgcccaagaacttacagctgaagccgctgaaaaacagccggcaggtagaagtttcctgggagtacccagatacctggtccacgccgcactcctacttctccctcaccttctgtgtacaagtacaaggcaagagcaagagagagaagaaagatcgtgtcttcacagataaaacatcagccacggtcatctgcaggaaaaatgccagcatctcggtgcgggcccaggaccgctactacagcagcagctggagtgagtgggcatctgtgccctgcagtggtggtgggggtggtggcagcagaaaccttcctgtggccactccagaccctggcatgttcccgtgccttcaccactcccaaaatttacttcgagctgtttctaacatgctgcagaaagcacggcaaactttagaattctacccgtgcacttctgaagaaattgaccatgaagatatcacaaaagataaaaccagcacagtggaggcctgtcttcctttagagctgaccaaaaatgaatcctgcctcaacagcagagagaccagcttcatcaccaatggcagctgcctggcctccaggaaaaccagcttcatgatggcgctctgcctcagctccatctatgaagatttgaagatgtaccaagtagaatttaaaaccatgaatgccaaattattaatggaccccaagaggcagatatttttagatcaaaacatgctggcagttattgatgagctcatgcaagcattaaacttcaacagtgagacggtacctcaaaaaagcagccttgaagagccagatttctacaaaaccaagatcaaactctgcattttacttcatgccttccgcatccgggcggtcaccattgaccgtgtcatgtcctacttaaatgcctcgtgataataggctggagcctcggtggccatgcttcttgccccttgggcctccccccagcccctcctccccttcctgcacccgtaccccccaaacaccattgtcacactccagtggtctttgaataaagtctgagtgggcggcaaaaaaaaaaaaaaaaaaaaaaaaaaaaaaaaaaaaaaaaaaaaaaaaaaaaaaaaaaaaaaaaaaaaaaaaaaaaaaaaaaaaaaaaaaaaaaaaaaaatctag

SEQ ID NO: 1132 - RNA, 1890 nt, synthetic construct
  misc_feature 1..1890: note = hIL12AB_014
  modified_base 1: mod_base = m7g
  misc_feature 1..2: note = 5  to 5  triphosphate linkage
  source 1..1890: mol_type = other RNA
ggggaaataagagagaaaagaagagtaagaagaaatataagagccaccatgtgccaccagcagcttgtgatttcttggttctctcttgtgttccttgcttctcctcttgtggctatttgggagttaaaaaaggacgtgtacgtggtggagcttgactggtaccctgacgcacctggcgagatggtggtgcttacttgtgacactcctgaggaggacggcattacttggacgcttgaccagtcttctgaggtgcttggctctggcaaaacacttactattcaggtgaaggagttcggggatgctggccagtacacttgccacaagggcggcgaggtgctttctcactctcttcttcttcttcacaagaaggaggacggcatttggtctactgacattttaaaagaccagaaggagcccaagaacaaaacattccttcgttgcgaggccaagaactactctggccgtttcacttgctggtggcttactactatttctactgaccttactttctctgtgaagtcttctcgtggctcttctgaccctcagggcgtgacttgtggggctgctactctttctgctgagcgtgtgcgtggtgacaacaaggagtacgagtactctgtggagtgccaggaagattctgcttgccctgctgctgaggagtctcttcctattgaggtgatggtggatgctgtgcacaagttaaaatacgagaactacacttcttctttcttcattcgtgacattattaagcctgaccctcccaagaaccttcagttaaaacctttaaaaaactctcgtcaggtggaggtgtcttgggagtaccctgacacttggtctactcctcactcttacttctctcttactttctgcgtgcaggtgcagggcaagtctaagcgtgagaagaaggaccgtgtgttcactgacaaaacatctgctactgtgatttgcaggaagaatgcatctatttctgtgcgtgctcaggaccgttactactcttcttcttggtctgagtgggcttctgtgccttgctctggcggcggcggcggcggctccagaaatcttcctgtggctactcctgaccctggcatgttcccttgccttcaccactctcagaaccttcttcgtgctgtgagcaacatgcttcagaaggctcgtcaaactcttgagttctacccttgcacttctgaggagattgaccacgaagatatcaccaaagataaaacatctactgtggaggcttgccttcctcttgagcttaccaagaatgaatcttgcttaaattctcgtgagacgtctttcatcaccaacggctcttgccttgcctcgcgcaaaacatctttcatgatggctctttgcctttcttctatttacgaagatttaaaaatgtaccaggtggagttcaaaacaatgaatgcaaagcttcttatggaccccaagcgtcagattttccttgaccagaacatgcttgctgtgattgacgagcttatgcaggctttaaatttcaactctgagacggtgcctcagaagtcttctcttgaggagcctgacttctacaagaccaagattaagctttgcattcttcttcatgctttccgtattcgtgctgtgactattgaccgtgtgatgtcttacttaaatgcttcttgataataggctggagcctcggtggccatgcttcttgccccttgggcctccccccagcccctcctccccttcctgcacccgtaccccccaaacaccattgtcacactccagtggtctttgaataaagtctgagtgggcggcaaaaaaaaaaaaaaaaaaaaaaaaaaaaaaaaaaaaaaaaaaaaaaaaaaaaaaaaaaaaaaaaaaaaaaaaaaaaaaaaaaaaaaaaaaaaaaaaaaaatctag

SEQ ID NO: 1133 - RNA, 1890 nt, synthetic construct
  misc_feature 1..1890: note = hIL12AB_015
  modified_base 1: mod_base = m7g
  misc_feature 1..2: note = 5  to 5  triphosphate linkage
  source 1..1890: mol_type = other RNA
ggggaaataagagagaaaagaagagtaagaagaaatataagagccaccatgtgtcaccagcagctggtgatcagctggtttagcctggtgtttctggccagccccctggtggccatctgggaactgaagaaagacgtgtacgtggtagaactggattggtatccggacgctcccggcgaaatggtggtgctgacctgtgacacccccgaagaagacggaatcacctggaccctggaccagagcagcgaggtgctgggcagcggcaaaaccctgaccatccaagtgaaagagtttggcgatgccggccagtacacctgtcacaaaggcggcgaggtgctaagccattcgctgctgctgctgcacaaaaaggaagatggcatctggagcaccgatatcctgaaggaccagaaagaacccaaaaataagacctttctaagatgcgaggccaagaattatagcggccgtttcacctgctggtggctgacgaccatcagcaccgatctgaccttcagcgtgaaaagcagcagaggcagcagcgacccccaaggcgtgacgtgcggcgccgccaccctgagcgccgagagagtgagaggcgacaacaaggagtatgagtacagcgtggagtgccaggaagatagcgcctgccccgccgccgaggagagcctgcccatcgaggtgatggtggatgccgtgcacaagctgaagtatgaaaactacaccagcagcttcttcatcagagatatcatcaaacccgacccccccaagaacctgcagctgaagcccctgaagaatagccggcaggtggaggtgagctgggagtaccccgacacctggagcaccccccatagctacttcagcctgaccttctgcgtgcaggtgcagggcaagagcaagagagaaaagaaagatagagtgttcacagataagaccagcgccacggtgatctgcagaaaaaatgccagcatcagcgtgagagcccaagatagatactatagcagcagctggagcgaatgggccagcgtgccctgcagcggcggcggcggcggcggcagcagaaacctgcccgtggccacccccgaccccggcatgttcccctgcctgcaccacagccaaaacctgctgagagccgtgagcaacatgctgcagaaggcccggcagaccctggaattttacccctgcaccagcgaagagatcgatcatgaagatatcaccaaagataaaaccagcaccgtggaggcctgtctgcccctggaactgaccaagaatgagagctgcctaaatagcagagagaccagcttcataaccaatggcagctgcctggccagcagaaagaccagctttatgatggccctgtgcctgagcagcatctatgaagacctgaagatgtaccaggtggagttcaagaccatgaatgccaagctgctgatggatcccaagcggcagatctttctggatcaaaacatgctggccgtgatcgatgagctgatgcaggccctgaatttcaacagcgagaccgtgccccaaaaaagcagcctggaagaaccggatttttataaaaccaaaatcaagctgtgcatactgctgcatgccttcagaatcagagccgtgaccatcgatagagtgatgagctatctgaatgccagctgataataggctggagcctcggtggccatgcttcttgccccttgggcctccccccagcccctcctccccttcctgcacccgtaccccccaaacaccattgtcacactccagtggtctttgaataaagtctgagtgggcggcaaaaaaaaaaaaaaaaaaaaaaaaaaaaaaaaaaaaaaaaaaaaaaaaaaaaaaaaaaaaaaaaaaaaaaaaaaaaaaaaaaaaaaaaaaaaaaaaaaaatctag

SEQ ID NO: 1134 - RNA, 1890 nt, synthetic construct
  misc_feature 1..1890: note = hIL12AB_016
  modified_base 1: mod_base = m7g
  misc_feature 1..2: note = 5  to 5  triphosphate linkage
  source 1..1890: mol_type = other RNA
ggggaaataagagagaaaagaagagtaagaagaaatataagagccaccatgtgccaccagcagctggtcatcagctggttcagcctggtcttcctggccagccccctggtggccatctgggagctgaagaaggacgtatacgtagtggagttggattggtacccagacgctcctggggagatggtggtgctgacctgtgacaccccagaagaggacggtatcacctggaccctggaccagagctcagaagtgctgggcagtggaaaaaccctgaccatccaggtgaaggagtttggagatgctggccagtacacctgccacaagggtggtgaagtgctgagccacagcctgctgctgctgcacaagaaggaggatggcatctggagcacagatatcctgaaggaccagaaggagcccaagaacaagaccttccttcgctgtgaagccaagaactacagtggccgcttcacctgctggtggctgaccaccatcagcacagacctcaccttctcggtgaagagcagcagaggcagctcagacccccagggtgtcacctgtggggcggccacgctgtcggcggagagagttcgaggtgacaacaaggagtatgaatactcggtggagtgccaggaagattcggcgtgcccggcggcagaagagagcctgcccatagaagtgatggtggatgctgtgcacaagctgaagtatgaaaactacaccagcagcttcttcatcagagatatcatcaagccagacccgcccaagaacctgcagctgaagcccctgaagaacagccggcaggtggaggtttcctgggagtacccagatacgtggagcaccccccacagctacttcagcctgaccttctgtgtccaggtgcagggcaagagcaagagagagaagaaagatagagtcttcacagataagacctcggccacggtcatctgcagaaagaatgcctccatctcggttcgagcccaagatagatactacagcagcagctggtcagaatgggcctcggtgccctgcagtggtggcggcggcggcggcagcagaaacctgcctgttgccaccccagaccctgggatgttcccctgcctgcaccacagccagaacttattacgagctgtttctaacatgctgcagaaggcccggcagaccctggagttctacccctgcacctcagaagagattgaccatgaagatatcaccaaagataagaccagcactgtagaggcctgcctgcccctggagctgaccaagaatgaaagctgcctgaacagcagagagaccagcttcatcaccaatggaagctgcctggccagcagaaagaccagcttcatgatggccctgtgcctgagcagcatctatgaagacctgaagatgtaccaggtggagttcaagaccatgaatgcaaagctgctgatggaccccaagcggcagatatttttggaccagaacatgctggctgtcattgatgagctgatgcaggccctgaacttcaactcagaaactgtaccccagaagagcagcctggaggagccagatttctacaagaccaagatcaagctgtgcatcctgcttcatgctttcagaatcagagctgtcaccattgaccgcgtgatgagctacttaaatgcctcgtgataataggctggagcctcggtggccatgcttcttgccccttgggcctccccccagcccctcctccccttcctgcacccgtaccccccaaacaccattgtcacactccagtggtctttgaataaagtctgagtgggcggcaaaaaaaaaaaaaaaaaaaaaaaaaaaaaaaaaaaaaaaaaaaaaaaaaaaaaaaaaaaaaaaaaaaaaaaaaaaaaaaaaaaaaaaaaaaaaaaaaaaatctag

SEQ ID NO: 1135 - RNA, 1890 nt, synthetic construct
  misc_feature 1..1890: note = hIL12AB_017
  modified_base 1: mod_base = m7g
  misc_feature 1..2: note = 5  to 5  triphosphate linkage
  source 1..1890: mol_type = other RNA
ggggaaataagagagaaaagaagagtaagaagaaatataagagccaccatgtgccaccagcagctggtaatcagctggttttccctcgtctttctggcatcacccctggtggctatctgggagctgaagaaggacgtgtacgtggtggagctggattggtaccctgacgccccgggggaaatggtggtgttaacctgcgacacgcctgaggaggacggcatcacctggacgctggaccagagcagcgaggtgcttgggtctggtaaaactctgactattcaggtgaaagagttcggggatgccggccaatatacttgccacaagggtggcgaggtgctttctcattctctgctcctgctgcacaagaaagaagatggcatttggtctactgatattctgaaagaccagaaggagcccaagaacaagacctttctgagatgcgaggctaaaaactacagcggaagatttacctgctggtggctgaccacaatctcaaccgacctgacattttcagtgaagtccagcagagggagctccgaccctcagggcgtgacctgcggagccgccactctgtccgcagaaagagtgagaggtgataataaggagtacgagtattcagtcgagtgccaagaagattctgcctgcccagccgccgaggagagcctgccaatcgaggtgatggtagatgcggtacacaagctgaagtatgagaactacacatcctccttcttcataagagatattatcaagcctgacccacctaaaaatctgcaactcaagcctttgaaaaattcacggcaggtggaggtgagctgggagtaccctgatacttggagcaccccccatagctacttttcgctgacattctgcgtccaggtgcagggcaagtcaaagagagagaagaaggatcgcgtgttcactgataaaacaagcgccacagtgatctgcagaaaaaacgctagcattagcgtcagagcacaggaccggtattactccagctcctggagcgaatgggcatctgtgccctgcagcggtgggggcggaggcggatccagaaacctccccgttgccacacctgatcctggaatgttcccctgtctgcaccacagccagaacctgctgagagcagtgtctaacatgctccagaaggccaggcagaccctggagttttacccctgcaccagcgaggaaatcgatcacgaagatatcaccaaagataaaacctccaccgtggaggcctgcctgcccctggaactgaccaaaaacgagagctgcctgaatagcagggagacctccttcatcaccaacggctcatgccttgccagccggaaaactagcttcatgatggccctgtgcctgtcttcgatctatgaggacctgaaaatgtaccaggtcgaatttaagacgatgaacgcaaagctgctgatggaccccaagcggcagatctttctggaccagaacatgctggcagtcatagatgagttgatgcaggcattaaacttcaacagcgagaccgtgcctcagaagtccagcctcgaggagccagatttttataagaccaagatcaaactatgcatcctgctgcatgctttcaggattagagccgtcaccatcgatcgagtcatgtcttacctgaatgctagctgataataggctggagcctcggtggccatgcttcttgccccttgggcctccccccagcccctcctccccttcctgcacccgtaccccccaaacaccattgtcacactccagtggtctttgaataaagtctgagtgggcggcaaaaaaaaaaaaaaaaaaaaaaaaaaaaaaaaaaaaaaaaaaaaaaaaaaaaaaaaaaaaaaaaaaaaaaaaaaaaaaaaaaaaaaaaaaaaaaaaaaaatctag

SEQ ID NO: 1136 - RNA, 1890 nt, synthetic construct
  misc_feature 1..1890: note = hIL12AB_018
  modified_base 1: mod_base = m7g
  misc_feature 1..2: note = 5  to 5  triphosphate linkage
  source 1..1890: mol_type = other RNA
ggggaaataagagagaaaagaagagtaagaagaaatataagagccaccatgtgtcaccaacagttagtaatctcctggttttctctggtgtttctggccagccccctcgtggccatctgggagcttaaaaaggacgtttacgtggtggagttggattggtatcccgacgctccaggcgaaatggtcgtgctgacctgcgatacccctgaagaagacggtatcacctggacgctggaccagtcttccgaggtgcttggatctggcaaaacactgacaatacaagttaaggagttcggggacgcagggcagtacacctgccacaaaggcggcgaggtcctgagtcactccctgttactgctccacaagaaagaggacggcatttggtccaccgacattctgaaggaccagaaggagcctaagaataaaactttcctgagatgcgaggcaaaaaactatagcggccgctttacttgctggtggcttacaacaatctctaccgatttaactttctccgtgaagtctagcagaggatcctctgacccgcaaggagtgacttgcggagccgccaccttgagcgccgaaagagtccgtggcgataacaaagaatacgagtactccgtggagtgccaggaagattccgcctgcccagctgccgaggagtccctgcccattgaagtgatggtggatgccgtccacaagctgaagtacgaaaactataccagcagcttcttcatccgggatatcattaagcccgaccctcctaaaaacctgcaacttaagcccctaaagaatagtcggcaggttgaggtcagctgggaatatcctgacacatggagcaccccccactcttatttctccctgaccttctgcgtgcaggtgcagggcaagagtaaacgggagaaaaaagatagggtctttaccgataaaaccagcgctacggttatctgtcggaagaacgcttccatctccgtccgcgctcaggatcgttactactcgtcctcatggagcgagtgggccagcgtgccctgcagcggcggcggtggaggcggatccagaaatctgcctgttgccacaccagaccctggcatgttcccctgtctgcatcatagccagaacctgctcagagccgtgagcaacatgctccagaaggccaggcaaactttggagttctacccgtgtacatctgaggaaatcgatcacgaagatataaccaaagataaaacctctacagtagaggcttgtttgcccctggagttgaccaaaaacgagagttgcctgaacagtcgcgagacgagcttcattactaacggcagctgtctcgcctccagaaaaacatccttcatgatggccctgtgtctttccagcatatacgaagacctgaaaatgtaccaggtcgagttcaaaacaatgaacgccaagctgcttatggaccccaagcggcagatcttcctcgaccaaaacatgctcgctgtgatcgatgagctgatgcaggctctcaacttcaattccgaaacagtgccacagaagtccagtctggaagaacccgacttctacaagaccaagattaagctgtgtattttgctgcatgcgtttagaatcagagccgtgaccattgatcgggtgatgagctacctgaacgcctcgtgataataggctggagcctcggtggccatgcttcttgccccttgggcctccccccagcccctcctccccttcctgcacccgtaccccccaaacaccattgtcacactccagtggtctttgaataaagtctgagtgggcggcaaaaaaaaaaaaaaaaaaaaaaaaaaaaaaaaaaaaaaaaaaaaaaaaaaaaaaaaaaaaaaaaaaaaaaaaaaaaaaaaaaaaaaaaaaaaaaaaaaaatctag

SEQ ID NO: 1137 - RNA, 1890 nt, synthetic construct
  misc_feature 1..1890: note = hIL12AB_019
  modified_base 1: mod_base = m7g
  misc_feature 1..2: note = 5  to 5  triphosphate linkage
  source 1..1890: mol_type = other RNA
ggggaaataagagagaaaagaagagtaagaagaaatataagagccaccatgtgccaccagcagcttgtcatctcctggttttctcttgtcttcctggcctcgccgctggtggccatctgggagctgaagaaagacgtttacgtagtagagttggattggtacccagacgcacctggagaaatggtggttctcacctgtgacactcctgaagaagacggtatcacctggacgctggaccaaagctcagaagttcttggcagtggaaaaacgctgaccatacaagtaaaagaatttggggatgctggccagtacacgtgccacaaaggaggagaagttctcagccacagtttacttcttcttcacaagaaagaagatggcatctggtccacagatattttaaaagaccagaaggagcccaagaacaaaaccttcctccgctgtgaggccaagaactacagtggtcgtttcacctgctggtggctcaccaccatctccactgacctcaccttctctgtaaaaagcagccgtggttcttctgacccccaaggagtcacctgtggggctgccacgctctcggcagaaagagttcgaggtgacaacaaggaatatgaatattctgtggaatgtcaagaagattctgcctgcccggcggcagaagaaagtcttcccatagaagtcatggtggatgctgttcacaaattaaaatatgaaaactacaccagcagcttcttcattcgtgacatcatcaaaccagacccgcccaagaaccttcagttaaaacctttaaaaaacagccggcaggtagaagtttcctgggagtacccagatacgtggtccacgccgcactcctacttcagtttaaccttctgtgtacaagtacaaggaaaatcaaaaagagagaagaaagatcgtgtcttcactgacaaaacatctgccacggtcatctgcaggaagaatgcctccatctcggttcgagcccaggaccgctactacagcagcagctggagtgagtgggcatctgttccctgcagtggtggcggcggcggcggcagccgcaaccttcctgtggccacgccggaccctggcatgttcccgtgccttcaccactcccaaaatcttcttcgtgctgtttctaacatgctgcagaaggcgcgccaaactttagaattctacccgtgcacttctgaagaaatagaccatgaagatatcaccaaagataaaaccagcacggtggaggcctgccttcctttagagctgaccaagaatgaatcctgcctcaacagcagagagaccagcttcatcaccaatggcagctgcctggcctcgcgcaagaccagcttcatgatggcgctgtgcctttcttccatctatgaagatttaaagatgtaccaagtagaatttaaaaccatgaatgccaaattattaatggaccccaaacggcagatatttttggatcaaaacatgctggctgtcattgatgagctcatgcaagcattaaacttcaactcagaaactgttccccagaagtcatctttagaagagccagatttctacaaaacaaaaataaaactctgcattcttcttcatgccttccgcatccgtgctgtcaccattgaccgtgtcatgtcctacttaaatgcttcttgataataggctggagcctcggtggccatgcttcttgccccttgggcctccccccagcccctcctccccttcctgcacccgtaccccccaaacaccattgtcacactccagtggtctttgaataaagtctgagtgggcggcaaaaaaaaaaaaaaaaaaaaaaaaaaaaaaaaaaaaaaaaaaaaaaaaaaaaaaaaaaaaaaaaaaaaaaaaaaaaaaaaaaaaaaaaaaaaaaaaaaaatctag

SEQ ID NO: 1138 - RNA, 1890 nt, synthetic construct
  misc_feature 1..1890: note = hIL12AB_020
  modified_base 1: mod_base = m7g
  misc_feature 1..2: note = 5  to 5  triphosphate linkage
  source 1..1890: mol_type = other RNA
ggggaaataagagagaaaagaagagtaagaagaaatataagagccaccatgtgccaccagcagctggtgatcagctggttcagcctggtgttcctggctagccctctggtggccatctgggagctgaagaaggacgtgtacgtggtggagttggattggtaccccgacgctcccggcgagatggtggtgctgacctgcgacacccccgaggaggacgggatcacctggaccctggatcagtcaagcgaggtgctgggaagcggcaagaccctgaccatccaggtgaaggagttcggcgacgccggccaatacacttgccacaagggaggcgaggtgctgtcccactccctcctgctgctgcacaaaaaggaagacggcatctggagcaccgacatcctgaaagaccagaaggagcctaagaacaaaacattcctcagatgcgaggccaagaattactccgggagattcacctgttggtggctgaccaccatcagcacagacctgaccttcagcgtgaagagcagcagaggcagcagcgacccccagggcgtgacctgtggcgccgccaccctgagcgccgaaagagtgcgcggcgacaacaaggagtacgagtactccgtggaatgccaggaagatagcgcctgccccgccgccgaggagagcctgcccatcgaggtgatggtggacgccgtccacaagctgaagtacgagaactacacctctagcttcttcatcagagatatcatcaagcccgatccccccaagaacctgcagctgaaacccctgaagaacagccggcaggtggaggtgagctgggagtatcccgacacctggtccaccccccacagctattttagcctgaccttctgcgtgcaagtgcagggcaagagcaagagagagaagaaggaccgcgtgttcaccgacaaaaccagcgccaccgtgatctgcagaaagaacgccagcatcagcgtgagggcccaggatagatactacagttccagctggagcgagtgggccagcgtgccctgcagcggcggcggcgggggaggctcgagaaacctgcccgtggctacccccgatcccggaatgttcccctgcctgcaccacagccagaacctgctgagggcggtgtccaacatgcttcagaaggcccggcagaccctggagttctacccctgtacctctgaggagatcgatcatgaagatatcacaaaagataaaaccagcaccgtggaggcctgcctgcccctggagctgaccaagaacgagagctgcctgaactcccgcgagaccagcttcatcacgaacggcagctgcctggccagcaggaagacctccttcatgatggccctgtgcctgagcagcatctacgaggacctgaaaatgtaccaggtggagtttaagaccatgaacgccaagctgctgatggaccccaagcggcaaatcttcctggaccagaacatgctggcagtgatcgacgagctcatgcaggccctgaacttcaatagcgagacggtcccccagaagagcagcctggaggagcccgacttttacaagaccaagatcaagctgtgcatcctgctgcacgcctttagaatccgtgccgtgaccattgacagagtgatgagctacctgaatgccagctgataataggctggagcctcggtggccatgcttcttgccccttgggcctccccccagcccctcctccccttcctgcacccgtaccccccaaacaccattgtcacactccagtggtctttgaataaagtctgagtgggcggcaaaaaaaaaaaaaaaaaaaaaaaaaaaaaaaaaaaaaaaaaaaaaaaaaaaaaaaaaaaaaaaaaaaaaaaaaaaaaaaaaaaaaaaaaaaaaaaaaaaatctag

SEQ ID NO: 1139 - RNA, 1890 nt, synthetic construct
  misc_feature 1..1890: note = hIL12AB_021
  modified_base 1: mod_base = m7g
  misc_feature 1..2: note = 5  to 5  triphosphate linkage
  source 1..1890: mol_type = other RNA
ggggaaataagagagaaaagaagagtaagaagaaatataagagccaccatgtgccaccagcagctggtgatcagctggttcagcctggtgttcctggccagccctctggttgccatctgggagctgaagaaagacgtgtacgtcgtggaactggactggtatccggacgccccgggcgagatggtggtgctgacctgtgacacccccgaggaggacggcatcacctggacgctggaccaatcctccgaggtgctgggaagcggcaagaccctgaccatccaggtgaaggaattcggggacgccgggcagtacacctgccacaaggggggcgaagtgctgtcccactcgctgctgctcctgcataagaaggaggatggaatctggtccaccgacatcctcaaagatcagaaggagcccaagaacaagacgttcctgcgctgtgaagccaagaattattcggggcgattcacgtgctggtggctgacaaccatcagcaccgacctgacgtttagcgtgaagagcagcagggggtccagcgacccccagggcgtgacgtgcggcgccgccaccctctccgccgagagggtgcggggggacaataaggagtacgagtacagcgtggaatgccaggaggacagcgcctgccccgccgcggaggaaagcctcccgatagaggtgatggtggacgccgtgcacaagctcaagtatgagaattacaccagcagctttttcatccgggacattatcaagcccgaccccccgaagaacctccagctgaagcccctgaagaacagccggcaggtggaagtctcctgggagtatcccgacacctggagcaccccgcacagctacttctccctgaccttctgtgtgcaggtgcagggcaagtccaagagggaaaagaaggacagggttttcaccgacaagaccagcgcgaccgtgatctgccggaagaacgccagcataagcgtccgcgcccaagataggtactacagcagctcctggagcgagtgggctagcgtgccctgcagcgggggcgggggtgggggctccaggaacctgccagtggcgacccccgaccccggcatgttcccctgcctccatcacagccagaacctgctgagggccgtcagcaatatgctgcagaaggccaggcagaccctggaattctacccctgcacgtcggaggagatcgatcacgaggatatcacaaaagacaagacttccaccgtggaggcctgcctgcccctggagctcaccaagaatgagtcctgtctgaactcccgggaaaccagcttcatcaccaacgggtcctgcctggccagcaggaagaccagctttatgatggccctgtgcctgtcgagcatctacgaggacctgaagatgtaccaggtcgagttcaagacaatgaacgccaagctgctgatggaccccaagaggcaaatcttcctggaccagaatatgcttgccgtcatcgacgagctcatgcaggccctgaacttcaactccgagaccgtgccccagaagagcagcctggaggagcccgacttctacaagaccaagatcaagctgtgcatcctgctgcacgcgttcaggatccgggcagtcaccatcgaccgtgtgatgtcctacctgaacgccagctgataataggctggagcctcggtggccatgcttcttgccccttgggcctccccccagcccctcctccccttcctgcacccgtaccccccaaacaccattgtcacactccagtggtctttgaataaagtctgagtgggcggcaaaaaaaaaaaaaaaaaaaaaaaaaaaaaaaaaaaaaaaaaaaaaaaaaaaaaaaaaaaaaaaaaaaaaaaaaaaaaaaaaaaaaaaaaaaaaaaaaaaatctag

SEQ ID NO: 1140 - RNA, 1890 nt, synthetic construct
  misc_feature 1..1890: note = hIL12AB_022
  modified_base 1: mod_base = m7g
  misc_feature 1..2: note = 5  to 5  triphosphate linkage
  source 1..1890: mol_type = other RNA
ggggaaataagagagaaaagaagagtaagaagaaatataagagccaccatgtgccatcagcagctggtgatcagctggttcagcctggtgttcctcgcctctcccctggtggccatctgggagctcaaaaaggacgtgtacgtggtggagctcgactggtacccagacgcccccggggagatggtggtgctgacctgcgacacccccgaagaagacggcatcacgtggaccctcgaccagtccagcgaggtgctggggagcgggaagactctgaccatccaggtcaaggagttcggggacgccgggcagtacacgtgccacaagggcggcgaagtcttaagccacagcctgctcctgctgcacaagaaggaggacgggatctggtccacagacatactgaaggaccagaaggagccgaagaataaaacctttctgaggtgcgaggccaagaactattccggcaggttcacgtgctggtggcttacaacaatcagcacagacctgacgttcagcgtgaagtccagccgcggcagcagcgacccccagggggtgacctgcggcgccgccaccctgagcgccgagcgggtgcgcggggacaacaaggagtacgagtactccgtggagtgccaggaagacagcgcctgtcccgccgccgaagagagcctgcctatcgaggtcatggtagatgcagtgcataagctgaagtacgagaactatacgagcagctttttcatacgcgacatcatcaagcccgacccccccaagaacctgcagcttaagcccctgaagaatagccggcaggtggaggtctcctgggagtaccccgacacctggtcaacgccccacagctacttctccctgaccttttgtgtccaagtccagggaaagagcaagagggagaagaaagatcgggtgttcaccgacaagacctccgccacggtgatctgcaggaagaacgccagcatctccgtgagggcgcaagacaggtactactccagcagctggtccgaatgggccagcgtgccctgctccggcggcgggggcggcggcagccgaaacctacccgtggccacgccggatcccggcatgtttccctgcctgcaccacagccagaacctcctgagggccgtgtccaacatgctgcagaaggccaggcagactctggagttctacccctgcacgagcgaggagatcgatcacgaggacatcaccaaggataagaccagcactgtggaggcctgccttcccctggagctgaccaagaacgagagctgtctgaactccagggagacctcattcatcaccaacggctcctgcctggccagcaggaaaaccagcttcatgatggccttgtgtctcagctccatctacgaggacctgaagatgtatcaggtcgagttcaagacaatgaacgccaagctgctgatggaccccaaaaggcagatcttcctggaccagaacatgctggccgtcatcgacgagctgatgcaggccctgaacttcaacagcgagacggtgccccagaaaagctccctggaggagcccgacttctacaagaccaagatcaagctgtgcatcctgctgcacgccttcaggatcagggcagtgaccatcgaccgggtgatgtcataccttaacgccagctgataataggctggagcctcggtggccatgcttcttgccccttgggcctccccccagcccctcctccccttcctgcacccgtaccccccaaacaccattgtcacactccagtggtctttgaataaagtctgagtgggcggcaaaaaaaaaaaaaaaaaaaaaaaaaaaaaaaaaaaaaaaaaaaaaaaaaaaaaaaaaaaaaaaaaaaaaaaaaaaaaaaaaaaaaaaaaaaaaaaaaaaatctag

SEQ ID NO: 1141 - RNA, 1890 nt, synthetic construct
  misc_feature 1..1890: note = hIL12AB_023
  modified_base 1: mod_base = m7g
  misc_feature 1..2: note = 5  to 5  triphosphate linkage
  source 1..1890: mol_type = other RNA
ggggaaataagagagaaaagaagagtaagaagaaatataagagccaccatgtgccatcagcagctggtgatctcctggttcagcctggtgtttctggcctcgcccctggtcgccatctgggagctgaagaaagacgtgtacgtcgtcgaactggactggtaccccgacgcccccggggagatggtggtgctgacctgcgacacgccggaggaggacggcatcacctggaccctggatcaaagcagcgaggtgctgggcagcggcaagaccctgaccatccaagtgaaggaattcggcgatgccggccagtacacctgtcacaaagggggcgaggtgctcagccacagcctgctgctgctgcacaagaaggaggatggcatctggagcaccgatatcctgaaggaccagaaagagcccaagaacaagacgttcctgaggtgcgaggccaagaactacagcggtaggttcacgtgttggtggctgaccaccatcagcaccgacctgacgttcagcgtgaagagctccaggggcagctccgacccacagggggtgacgtgcggggccgcaaccctcagcgccgaaagggtgcggggggacaacaaggagtacgaatactccgtggagtgccaggaagattcggcctgccccgccgcggaggagagcctccccatcgaggtaatggtggacgccgtgcataagctgaagtacgagaactacaccagctcgttcttcatccgagacatcatcaaacccgacccgcccaaaaatctgcagctcaagcccctgaagaactccaggcaggtggaggtgagctgggagtaccccgacacctggtccaccccgcacagctacttctccctgacattctgcgtgcaggtgcagggcaagagcaagcgggagaagaaggacagggtgttcaccgacaagacgagcgccaccgtgatctgccgaaagaacgccagcatctcggtgcgcgcccaggataggtactattccagctcctggagcgagtgggcctcggtaccctgcagcggcggcgggggcggcggcagtaggaatctgcccgtggctaccccggacccgggcatgttcccctgcctccaccacagccagaacctgctgagggccgtgagcaacatgctgcagaaggccagacagacgctggagttctacccctgcacgagcgaggagatcgaccacgaggacatcaccaaggataaaacttccaccgtcgaggcctgcctgcccttggagctgaccaagaatgaatcctgtctgaacagcagggagacctcgtttatcaccaatggcagctgcctcgcctccaggaagaccagcttcatgatggccctctgtctgagctccatctatgaggacctgaagatgtaccaggtggagttcaagaccatgaacgcgaagctgctgatggaccccaagaggcagatcttcctggatcagaatatgctggcggtgatcgacgagctcatgcaggccctcaatttcaatagcgagacagtgccccagaagtcctccctggaggagcccgacttctacaagaccaagatcaagctgtgtatcctgctgcacgccttccggatccgggccgtcaccatcgaccgggtcatgagctacctcaatgccagctgataataggctggagcctcggtggccatgcttcttgccccttgggcctccccccagcccctcctccccttcctgcacccgtaccccccaaacaccattgtcacactccagtggtctttgaataaagtctgagtgggcggcaaaaaaaaaaaaaaaaaaaaaaaaaaaaaaaaaaaaaaaaaaaaaaaaaaaaaaaaaaaaaaaaaaaaaaaaaaaaaaaaaaaaaaaaaaaaaaaaaaaatctag

SEQ ID NO: 1142 - RNA, 1890 nt, synthetic construct
  misc_feature 1..1890: note = hIL12AB_024
  modified_base 1: mod_base = m7g
  misc_feature 1..2: note = 5  to 5  triphosphate linkage
  source 1..1890: mol_type = other RNA
ggggaaataagagagaaaagaagagtaagaagaaatataagagccaccatgtgccaccagcagctggtgatctcctggttctccctggtgttcctggcctcgcccctggtggccatctgggagctgaagaaggacgtgtacgtcgtggagctcgactggtaccccgacgcccctggcgagatggtggtgctgacctgcgacaccccagaggaggatggcatcacctggaccctggatcagtcctccgaggtgctgggctccggcaagacgctgaccatccaagtgaaggagttcggtgacgccggacagtatacctgccataagggcggcgaggtcctgtcccacagcctcctcctcctgcataagaaggaggacggcatctggagcaccgacatcctgaaggaccagaaggagcccaagaacaagacctttctgaggtgcgaggccaagaactacagcggccgattcacctgctggtggctcaccaccatatccaccgacctgactttctccgtcaagtcctcccgggggtccagcgacccccagggagtgacctgcggcgccgccaccctcagcgccgagcgggtgcggggggacaacaaggagtacgaatactccgtcgagtgccaggaggactccgcctgcccggccgccgaggagagcctgcccatcgaggtgatggtcgacgcggtgcacaagctgaagtacgagaactacaccagcagtttcttcatcagggatatcatcaagccagatcccccgaagaatctgcaactgaagccgctgaaaaactcacgacaggtggaggtgagctgggagtaccccgacacgtggagcaccccacattcctacttcagcctgaccttctgcgtgcaggtccagggcaagagcaagcgggagaagaaggacagggtgttcacggataagaccagtgccaccgtgatctgcaggaagaacgcctctattagcgtgagggcccaggatcggtattactcctcgagctggagcgaatgggcctccgtgccctgcagtggggggggtggaggcgggagcaggaacctgcccgtagcaacccccgaccccgggatgttcccctgtctgcaccactcgcagaacctgctgcgcgcggtgagcaacatgctccaaaaagcccgtcagaccttagagttctacccctgcaccagcgaagaaatcgaccacgaagacatcaccaaggacaaaaccagcaccgtggaggcgtgcctgccgctggagctgaccaagaacgagagctgcctcaactccagggagaccagctttatcaccaacggctcgtgcctagccagccggaaaaccagcttcatgatggccctgtgcctgagctccatttacgaggacctgaagatgtatcaggtggagttcaagaccatgaatgccaaactcctgatggaccccaagaggcagatcttcctggaccagaacatgctcgcggtgatcgatgagctgatgcaggccctgaactttaatagcgagaccgtgccccagaaaagcagcctggaggagccggacttctacaagaccaaaatcaagctgtgcatcctgctccacgccttccgcatccgggccgtgaccatcgacagggtgatgagctacctgaacgccagctgataataggctggagcctcggtggccatgcttcttgccccttgggcctccccccagcccctcctccccttcctgcacccgtaccccccaaacaccattgtcacactccagtggtctttgaataaagtctgagtgggcggcaaaaaaaaaaaaaaaaaaaaaaaaaaaaaaaaaaaaaaaaaaaaaaaaaaaaaaaaaaaaaaaaaaaaaaaaaaaaaaaaaaaaaaaaaaaaaaaaaaaatctag

SEQ ID NO: 1143 - RNA, 1890 nt, synthetic construct
  misc_feature 1..1890: note = hIL12AB_025
  modified_base 1: mod_base = m7g
  misc_feature 1..2: note = 5  to 5  triphosphate linkage
  source 1..1890: mol_type = other RNA
ggggaaataagagagaaaagaagagtaagaagaaatataagagccaccatgtgccatcagcagctggtgatttcctggttctccctggtgttcctggccagccccctcgtggcgatctgggagctaaagaaggacgtgtacgtggtggagctggactggtacccggacgcacccggcgagatggtcgttctgacctgcgatacgccagaggaggacggcatcacctggaccctcgatcagagcagcgaggtcctggggagcggaaagaccctgaccatccaggtcaaggagttcggcgacgccggccagtacacctgccacaaaggtggcgaggtcctgagccactcgctgctgctcctgcataagaaggaggacggaatctggagcacagacatcctgaaagaccagaaggagcccaagaacaagaccttcctgaggtgcgaggccaagaactacagcgggcgcttcacgtgctggtggctgaccaccatcagcacggacctcaccttctccgtgaagagcagccggggatccagcgatccccaaggcgtcacctgcggcgcggccaccctgagcgcggagagggtcaggggcgataataaggagtatgagtacagcgtggagtgccaggaggacagcgcctgcccggccgccgaggagtccctgccaatcgaagtgatggtcgacgccgtgcacaagctgaagtacgagaactacaccagcagcttcttcatccgggatatcatcaagcccgatcccccgaagaacctgcagctgaagcccctcaagaacagccggcaggtggaggtgagttgggagtaccccgacacctggtcaacgccccacagctacttctccctgaccttctgtgtgcaggtgcagggaaagagcaagagggagaagaaagaccgggtcttcaccgacaagaccagcgccacggtgatctgcaggaagaacgcaagcatctccgtgagggcccaggacaggtactacagctccagctggtccgaatgggccagcgtgccctgtagcggcggcgggggcggtggcagccgcaacctcccagtggccacccccgaccccggcatgttcccctgcctgcaccacagccagaatctgctgagggccgtgagtaacatgctgcagaaggcaaggcaaaccctcgaattctatccctgcacctccgaggagatcgaccacgaggatatcaccaaggacaagaccagcaccgtcgaggcctgtctccccctggagctgaccaagaatgagagctgcctgaacagccgggagaccagcttcatcaccaacgggagctgcctggcctccaggaagacctcgttcatgatggcgctgtgcctctcaagcatatacgaggatctgaagatgtaccaggtggagtttaagacgatgaacgccaagctgctgatggacccgaagaggcagatcttcctggaccagaacatgctggccgtgatagacgagctcatgcaggccctgaacttcaactccgagaccgtgccgcagaagtcatccctcgaggagcccgacttctataagaccaagatcaagctgtgcatcctgctccacgccttccggataagggccgtgacgatcgacagggtgatgagctaccttaacgccagctgataataggctggagcctcggtggccatgcttcttgccccttgggcctccccccagcccctcctccccttcctgcacccgtaccccccaaacaccattgtcacactccagtggtctttgaataaagtctgagtgggcggcaaaaaaaaaaaaaaaaaaaaaaaaaaaaaaaaaaaaaaaaaaaaaaaaaaaaaaaaaaaaaaaaaaaaaaaaaaaaaaaaaaaaaaaaaaaaaaaaaaaatctag

SEQ ID NO: 1144 - RNA, 1890 nt, synthetic construct
  misc_feature 1..1890: note = hIL12AB_026
  modified_base 1: mod_base = m7g
  misc_feature 1..2: note = 5  to 5  triphosphate linkage
  source 1..1890: mol_type = other RNA
ggggaaataagagagaaaagaagagtaagaagaaatataagagccaccatgtgccaccagcagctcgtgatcagctggttctccctggtgtttctcgccagccccctggtggccatctgggagctgaagaaggacgtgtacgtggtggagctggactggtaccctgacgccccgggggagatggtcgtgctgacctgcgacacccccgaagaggacggtatcacctggaccctggaccagtccagcgaggtgctgggcagcggcaagaccctgactattcaagtcaaggagttcggagacgccggccagtacacctgccacaagggtggagaggtgttatcacacagcctgctgctgctgcacaagaaggaagacgggatctggagcaccgacatcctgaaggaccagaaggagcccaaaaacaagaccttcctgcggtgcgaggccaagaactattcgggccgctttacgtgctggtggctgaccaccatcagcactgatctcaccttcagcgtgaagtcctcccgggggtcgtccgacccccagggggtgacctgcggggccgccaccctgtccgccgagagagtgaggggcgataataaggagtacgagtacagcgttgagtgccaggaagatagcgcctgtcccgccgccgaggagagcctgcccatcgaggtgatggtggacgccgtccacaagctgaagtatgagaactacacctcaagcttcttcatcagggacatcatcaaacccgatccgcccaagaatctgcagctgaagcccctgaaaaatagcaggcaggtggaggtgagctgggagtaccccgacacctggtccaccccccatagctatttctccctgacgttctgcgtgcaggtgcaagggaagagcaagcgggagaagaaggaccgggtgttcaccgacaagacctccgccaccgtgatctgtaggaagaacgcgtcgatctcggtcagggcccaggacaggtattacagcagcagctggagcgagtgggcgagcgtgccctgctcgggcggcggcggcggcgggagcagaaatctgcccgtggccaccccagaccccggaatgttcccctgcctgcaccattcgcagaacctcctgagggccgtgagcaacatgctgcagaaggcccgccagacgctggagttctacccctgcacgagcgaggagatcgaccacgaagacatcaccaaggacaaaaccagcaccgtggaggcctgcctgcccctggagctgaccaaaaacgaatcctgcctcaacagccgggagaccagcttcatcaccaacggcagctgcctggccagccgaaagacctccttcatgatggccctctgcctgagcagcatctatgaggatctgaagatgtatcaggtggagttcaagaccatgaatgccaagctgctgatggaccccaagaggcagatattcctggaccagaatatgctggccgtgatcgacgagctgatgcaggccctgaacttcaacagcgagaccgtcccccagaagtccagcctggaggagccggacttttacaaaacgaagatcaagctgtgcatactgctgcacgccttcaggatccgggccgtgacaatcgacagggtgatgtcctacctgaacgccagctgataataggctggagcctcggtggccatgcttcttgccccttgggcctccccccagcccctcctccccttcctgcacccgtaccccccaaacaccattgtcacactccagtggtctttgaataaagtctgagtgggcggcaaaaaaaaaaaaaaaaaaaaaaaaaaaaaaaaaaaaaaaaaaaaaaaaaaaaaaaaaaaaaaaaaaaaaaaaaaaaaaaaaaaaaaaaaaaaaaaaaaaatctag

SEQ ID NO: 1145 - RNA, 1890 nt, synthetic construct
  misc_feature 1..1890: note = hIL12AB_027
  modified_base 1: mod_base = m7g
  misc_feature 1..2: note = 5  to 5  triphosphate linkage
  source 1..1890: mol_type = other RNA
ggggaaataagagagaaaagaagagtaagaagaaatataagagccaccatgtgtcaccagcagctggtgatcagctggttctccctggtgttcctggccagccccctggtggccatctgggagctcaagaaggacgtctacgtcgtggagctggattggtaccccgacgctcccggggagatggtggtgctgacctgcgacacccccgaggaggacggcatcacctggacgctggaccagagctcagaggtgctgggaagcggaaagacactgaccatccaggtgaaggagttcggggatgccgggcagtatacctgccacaagggcggcgaagtgctgagccattccctgctgctgctgcacaagaaggaggacggcatatggtccaccgacatcctgaaggatcagaaggagccgaagaataaaaccttcctgaggtgcgaggccaagaattacagcggccgattcacctgctggtggctgaccaccatcagcaccgacctgaccttcagtgtgaagtcctcacggggcagctcagatccccagggcgtgacctgcggggccgcgacactcagcgccgagcgggtgaggggtgataacaaggagtacgagtattctgtggagtgccaggaagactccgcctgtcccgccgccgaggagtccctgcccatcgaggtgatggtggacgccgtgcataaactgaagtacgagaactacacctccagcttcttcatccgggatataatcaagcccgaccctccgaaaaacctgcagctgaagccccttaaaaacagccggcaggtggaggtgagctgggagtaccccgacacctggagcaccccccatagctatttcagcctgaccttctgcgtgcaggtgcaggggaagtccaagcgcgagaaaaaggaccgggtgttcaccgacaagacgagcgccaccgtgatctgccggaagaacgccagtataagcgtaagggcccaggataggtactacagctccagctggtcggagtgggcctccgtgccctgttccggcggcggggggggtggcagcaggaacctccccgtggccacgccggaccccggcatgttcccgtgcctgcaccactcccaaaacctcctgcgggccgtcagcaacatgctgcaaaaggcgcggcagaccctggagttttacccctgtacctccgaagagatcgaccacgaggatatcaccaaggataagacctccaccgtggaggcctgtctccccctggagctgaccaagaacgagagctgtcttaacagcagagagacctcgttcataacgaacggctcctgcctcgcttccaggaagacgtcgttcatgatggcgctgtgcctgtccagcatctacgaggacctgaagatgtatcaggtcgagttcaaaaccatgaacgccaagctgctgatggaccccaagaggcagatcttcctggaccagaacatgctcgccgtgatcgacgagctgatgcaggccctgaacttcaacagcgaaaccgtgccccagaagtcaagcctggaggagccggacttctataagaccaagatcaagctgtgtatcctgctacacgcttttcgtatccgggccgtgaccatcgacagggttatgtcgtacttgaacgccagctgataataggctggagcctcggtggccatgcttcttgccccttgggcctccccccagcccctcctccccttcctgcacccgtaccccccaaacaccattgtcacactccagtggtctttgaataaagtctgagtgggcggcaaaaaaaaaaaaaaaaaaaaaaaaaaaaaaaaaaaaaaaaaaaaaaaaaaaaaaaaaaaaaaaaaaaaaaaaaaaaaaaaaaaaaaaaaaaaaaaaaaaatctag

SEQ ID NO: 1146 - RNA, 1890 nt, synthetic construct
  misc_feature 1..1890: note = hIL12AB_028
  modified_base 1: mod_base = m7g
  misc_feature 1..2: note = 5  to 5  triphosphate linkage
  source 1..1890: mol_type = other RNA
ggggaaataagagagaaaagaagagtaagaagaaatataagagccaccatgtgccaccaacagctcgtgatcagctggttcagcctggtgttcctggccagcccgctggtggccatctgggagctgaagaaggacgtgtacgtggtggagctggactggtaccccgacgcccccggcgagatggtggtcctgacctgcgacacgccggaagaggacggcatcacctggaccctggatcagtccagcgaggtgctgggctccggcaagaccctgaccattcaggtgaaggagttcggcgacgccggtcagtacacctgccacaagggcggcgaggtgctgagccacagcctactgctcctgcacaaaaaggaggatggaatctggtccaccgacatcctcaaggaccagaaggagccgaagaacaagacgttcctccggtgcgaggccaagaactacagcggcaggtttacctgctggtggctgaccaccatcagcaccgacctgacattttccgtgaagagcagccgcggcagcagcgatccccagggcgtgacctgcggggcggccaccctgtccgccgagcgtgtgaggggcgacaacaaggagtacgagtacagcgtggaatgccaggaggacagcgcctgtcccgccgccgaggagagcctgccaatcgaggtcatggtggacgccgtgcacaagctgaagtacgagaactacacgagcagcttcttcatcagggacatcatcaaaccggacccgcccaagaacctgcagctgaaacccttgaaaaacagcaggcaggtggaagtgtcttgggagtaccccgacacctggtccaccccccacagctactttagcctgaccttctgtgtgcaggtccagggcaagtccaagagggagaagaaggacagggtgttcaccgacaaaaccagcgccaccgtgatctgcaggaagaacgcctccatcagcgtgcgggcccaggacaggtattacagctcgtcgtggagcgagtgggccagcgtgccctgctccgggggaggcggcggcggaagccggaatctgcccgtggccacccccgatcccggcatgttcccgtgtctgcaccacagccagaacctgctgcgggccgtgagcaacatgctgcagaaggcccgccaaaccctggagttctacccctgtacaagcgaggagatcgaccatgaggacattaccaaggacaagaccagcaccgtggaggcctgcctgcccctcgagctcacaaagaacgaatcctgcctgaatagccgcgagaccagctttatcacgaacgggtcctgcctcgccagccggaagacaagcttcatgatggccctgtgcctgagcagcatctacgaggacctgaaaatgtaccaagtggagttcaaaacgatgaacgccaagctgctgatggaccccaagcgccagatcttcctggaccagaacatgctggccgtcatcgacgagctcatgcaggccctgaacttcaacagcgagaccgtgccccagaagagcagcctggaggagcccgacttctacaagacgaagatcaagctctgcatcctgctgcacgctttccgcatccgcgcggtgaccatcgaccgggtgatgagctacctcaacgccagttgataataggctggagcctcggtggccatgcttcttgccccttgggcctccccccagcccctcctccccttcctgcacccgtaccccccaaacaccattgtcacactccagtggtctttgaataaagtctgagtgggcggcaaaaaaaaaaaaaaaaaaaaaaaaaaaaaaaaaaaaaaaaaaaaaaaaaaaaaaaaaaaaaaaaaaaaaaaaaaaaaaaaaaaaaaaaaaaaaaaaaaaatctag

SEQ ID NO: 1147 - RNA, 1890 nt, synthetic construct
  misc_feature 1..1890: note = hIL12AB_029
  modified_base 1: mod_base = m7g
  misc_feature 1..2: note = 5  to 5  triphosphate linkage
  source 1..1890: mol_type = other RNA
ggggaaataagagagaaaagaagagtaagaagaaatataagagccaccatgtgccaccaacagctggtgatcagctggttcagcctggtgtttctggcctcccctctggtggccatctgggagctgaagaaggacgtgtacgtggtggagctggactggtaccctgacgcccccggcgaaatggtggtgctgacgtgcgacacccccgaggaggatggcatcacctggaccctggaccaaagcagcgaggtcctcggaagcggcaagaccctcactatccaagtgaaggagttcggggatgcgggccagtacacctgccacaagggcggcgaggtgctgtctcatagcctgctgctcctgcataagaaggaagacggcatctggagcaccgacatactgaaggatcagaaggagcccaagaacaagaccttcctgaggtgcgaggccaagaactactccgggcgcttcacctgttggtggctgaccaccatctccaccgacctgaccttcagcgtgaagagcagcagggggagcagcgacccccagggggtgacctgcggagccgcgaccttgtcggccgagcgggtgaggggcgacaataaggagtacgagtactcggtcgaatgccaggaggactccgcctgccccgccgccgaggagtccctccccatcgaagtgatggtggacgccgtccacaagctgaagtacgagaactacaccagcagcttcttcatacgggatatcatcaagcccgaccccccgaagaacctgcagctgaaacccttgaagaactccaggcaggtggaggtgagctgggagtaccccgacacctggtccaccccgcactcatacttcagcctgaccttctgtgtacaggtccagggcaagagcaagagggaaaagaaggatagggtgttcaccgacaagacctccgccacggtgatctgtcggaaaaacgccagcatctccgtgcgggcccaggacaggtactattccagcagctggagcgagtgggcctccgtcccctgctccggcggcggtggcgggggcagcaggaacctccccgtggccacccccgatcccgggatgttcccatgcctgcaccacagccaaaacctgctgagggccgtctccaatatgctgcagaaggcgaggcagaccctggagttctacccctgtacctccgaggagatcgaccacgaggatatcaccaaggacaagacctccacggtcgaggcgtgcctgcccctggagctcacgaagaacgagagctgccttaactccagggaaacctcgtttatcacgaacggcagctgcctggcgtcacggaagacctcctttatgatggccctatgtctgtcctcgatctacgaggacctgaagatgtaccaggtggagttcaagaccatgaacgccaagctgctgatggatcccaagaggcagattttcctggaccagaacatgctggccgtgattgacgagctgatgcaggcgctgaacttcaacagcgagacagtgccgcagaagagctccctggaggagccggacttttacaagaccaagataaagctgtgcatcctgctccacgccttcagaatacgggccgtcaccatcgatagggtgatgtcttacctgaacgcctcctgataataggctggagcctcggtggccatgcttcttgccccttgggcctccccccagcccctcctccccttcctgcacccgtaccccccaaacaccattgtcacactccagtggtctttgaataaagtctgagtgggcggcaaaaaaaaaaaaaaaaaaaaaaaaaaaaaaaaaaaaaaaaaaaaaaaaaaaaaaaaaaaaaaaaaaaaaaaaaaaaaaaaaaaaaaaaaaaaaaaaaaaatctag

SEQ ID NO: 1148 - RNA, 1890 nt, synthetic construct
  misc_feature 1..1890: note = hIL12AB_030
  modified_base 1: mod_base = m7g
  misc_feature 1..2: note = 5  to 5  triphosphate linkage
  source 1..1890: mol_type = other RNA
ggggaaataagagagaaaagaagagtaagaagaaatataagagccaccatgtgccaccagcagctggtgattagctggtttagcctggtgttcctggcaagccccctggtggccatctgggaactgaaaaaggacgtgtacgtggtcgagctggattggtaccccgacgcccccggcgaaatggtggtgctgacgtgtgatacccccgaggaggacgggatcacctggaccctggatcagagcagcgaggtgctggggagcgggaagaccctgacgatccaggtcaaggagttcggcgacgctgggcagtacacctgtcacaagggcggggaggtgctgtcccactccctgctgctcctgcataagaaagaggacggcatctggtccaccgacatcctcaaggaccagaaggagcccaagaacaagaccttcctgcggtgtgaggcgaagaactacagcggccgtttcacctgctggtggctgacgacaatcagcaccgacttgacgttctccgtgaagtcctccagaggcagctccgacccccaaggggtgacgtgcggcgcggccaccctgagcgccgagcgggtgcggggggacaacaaggagtacgagtactccgtggagtgccaggaggacagcgcctgtcccgcagccgaggagtccctgcccatcgaagtcatggtggacgccgtccacaagctgaagtacgagaactacaccagcagcttcttcatccgcgatatcatcaagcccgatccccccaaaaacctgcaactgaagccgctgaagaatagcaggcaggtggaggtgtcctgggagtacccggacacctggagcacgccccacagctatttcagcctgaccttttgcgtgcaggtccaggggaagagcaagcgggagaagaaggaccgcgtgtttacggacaaaaccagcgccaccgtgatctgcaggaagaacgccagcatcagcgtgagggcccaggacaggtactacagcagctcctggagcgagtgggcctccgtgccctgttccggaggcggcgggggcggttcccggaacctcccggtggccacccccgacccgggcatgttcccgtgcctgcaccactcacagaatctgctgagggccgtgagcaatatgctgcagaaggcaaggcagaccctggagttttatccctgcaccagcgaggagatcgaccacgaagacatcaccaaggacaagaccagcacagtggaggcctgcctgcccctggaactgaccaagaacgagtcctgtctgaactcccgggaaaccagcttcataaccaacggctcctgtctcgccagcaggaagaccagcttcatgatggccctgtgcctcagctccatctacgaggacctcaagatgtaccaggttgagttcaagaccatgaacgccaagctcctgatggaccccaagaggcagatcttcctggaccagaatatgctggccgtgatcgatgagttaatgcaggcgctgaacttcaacagcgagacggtgccccaaaagtcctcgctggaggagcccgacttctacaagaccaagatcaagctgtgcatcctcctgcacgccttccgaatccgggccgtaaccatcgacagggtgatgagctatctcaacgcctcctgataataggctggagcctcggtggccatgcttcttgccccttgggcctccccccagcccctcctccccttcctgcacccgtaccccccaaacaccattgtcacactccagtggtctttgaataaagtctgagtgggcggcaaaaaaaaaaaaaaaaaaaaaaaaaaaaaaaaaaaaaaaaaaaaaaaaaaaaaaaaaaaaaaaaaaaaaaaaaaaaaaaaaaaaaaaaaaaaaaaaaaaatctag

SEQ ID NO: 1149 - RNA, 1890 nt, synthetic construct
  misc_feature 1..1890: note = hIL12AB_031
  modified_base 1: mod_base = m7g
  misc_feature 1..2: note = 5  to 5  triphosphate linkage
  source 1..1890: mol_type = other RNA
ggggaaataagagagaaaagaagagtaagaagaaatataagagccaccatgtgccaccagcagctcgtgatcagctggttctcgcttgtgttcctggcctcccccctcgtcgccatctgggagctgaagaaagacgtgtacgtggtggagctggactggtatcccgacgccccgggggagatggtggtgctgacctgcgacaccccggaagaggacggcatcacctggacgctcgaccagtcgtccgaagtgctggggtcgggcaagaccctcaccatccaggtgaaggagttcggagacgccggccagtacacctgtcataaggggggggaggtgctgagccacagcctcctgctcctgcacaaaaaggaggacggcatctggagcaccgatatcctcaaggaccagaaggagcccaagaacaagacgttcctgaggtgtgaggccaagaactacagcgggcggttcacgtgttggtggctcaccaccatctccaccgacctcaccttctccgtgaagtcaagcaggggcagctccgacccccaaggcgtcacctgcggcgccgccaccctgagcgccgagagggtcaggggggataacaaggaatacgagtacagtgtggagtgccaagaggatagcgcctgtcccgccgccgaagagagcctgcccatcgaagtgatggtggacgccgtgcacaagctgaagtacgagaactacacctccagcttcttcatcagggatatcatcaagcccgatccccccaagaacctgcagctgaagcccctgaagaacagcaggcaggtggaggtgagctgggagtatcccgacacgtggagcaccccgcacagctacttctcgctgaccttctgcgtgcaggtgcaagggaagtccaagagggagaagaaggatagggtgttcaccgacaaaacgagcgccaccgtgatctgccggaagaatgccagcatctctgtgagggcccaggacaggtactattccagctcctggtcggagtgggccagcgtgccctgtagcggcgggggcgggggcggcagcaggaacctcccggttgccacccccgaccccggcatgtttccgtgcctgcaccactcgcaaaacctgctgcgcgcggtctccaacatgctgcaaaaagcgcgccagacgctggagttctacccctgcaccagcgaggagatcgatcatgaagatatcaccaaagacaagacctcgaccgtggaggcctgcctgcccctggagctcaccaagaacgaaagctgcctgaacagcagggagacaagcttcatcaccaacggcagctgcctggcctcccggaagaccagcttcatgatggccctgtgcctgtccagcatctacgaggatctgaagatgtaccaagtggagtttaagaccatgaacgccaagctgttaatggaccccaaaaggcagatcttcctggatcagaacatgctggccgtcatcgacgagctgatgcaagccctgaacttcaacagcgagacggtgccccagaagagcagcctcgaggagcccgacttctataagaccaagataaagctgtgcattctgctgcacgccttcagaatcagggccgtgaccatcgatagggtgatgagctacctgaacgccagctgataataggctggagcctcggtggccatgcttcttgccccttgggcctccccccagcccctcctccccttcctgcacccgtaccccccaaacaccattgtcacactccagtggtctttgaataaagtctgagtgggcggcaaaaaaaaaaaaaaaaaaaaaaaaaaaaaaaaaaaaaaaaaaaaaaaaaaaaaaaaaaaaaaaaaaaaaaaaaaaaaaaaaaaaaaaaaaaaaaaaaaaatctag

SEQ ID NO: 1150 - RNA, 1890 nt, synthetic construct
  misc_feature 1..1890: note = hIL12AB_032
  modified_base 1: mod_base = m7g
  misc_feature 1..2: note = 5  to 5  triphosphate linkage
  source 1..1890: mol_type = other RNA
ggggaaataagagagaaaagaagagtaagaagaaatataagagccaccatgtgtcaccagcagctggtgatttcctggttcagtctggtgtttcttgccagccccctggtggccatctgggagctgaagaaagacgtatacgtcgtggagctggactggtatcccgacgctcccggcgagatggtggtcctcacctgcgacaccccagaggaggacggcatcacctggaccctggaccagagctccgaggtcctgggcagcggtaagaccctcaccatccaggtgaaggagtttggtgatgccgggcagtatacctgccacaagggcggcgaggtgctgtcccacagcctcctgttactgcataagaaggaggatggcatctggagcaccgacatcctcaaggaccagaaagagcccaagaacaagacctttctgcggtgcgaggcgaaaaattactccggccggttcacctgctggtggctgaccaccatcagcacggacctgacgttctccgtgaagtcgagcagggggagctccgatccccagggcgtgacctgcggcgcggccaccctgagcgccgagcgcgtccgcggggacaataaggaatacgaatatagcgtggagtgccaggaggacagcgcctgccccgcggccgaggagagcctcccgatcgaggtgatggtggatgccgtccacaagctcaaatacgaaaactacaccagcagcttcttcattagggacatcatcaagcccgacccccccaaaaacctgcagctgaagcccctgaagaacagccgccaggtcgaggtgtcatgggagtacccagacacctggagcaccccccactcctacttcagcctgaccttctgcgtccaggtgcagggaaagtccaaacgggagaagaaggatagggtctttaccgataagacgtcggccaccgtcatctgcaggaagaacgccagcataagcgtgcgggcgcaggatcggtactacagctcgagctggtccgaatgggcctccgtgccctgtagcggagggggtggcgggggcagcaggaacctgcccgtggccaccccggacccgggcatgtttccctgcctgcatcacagtcagaacctgctgagggccgtgagcaacatgctccagaaggcccgccagaccctggagttttacccctgcaccagcgaagagatcgatcacgaagacatcaccaaagacaagacctccaccgtggaggcctgtctgcccctggagctgaccaagaacgagagctgtctgaacagcagggagacctccttcatcaccaacggctcctgcctggcatcccggaagaccagcttcatgatggccctgtgtctgagctctatctacgaggacctgaagatgtaccaggtcgagttcaagaccatgaacgccaagctgctgatggaccccaagcgacagatattcctggaccagaacatgctcgccgtgatcgatgaactgatgcaagccctgaacttcaatagcgagaccgtgccccagaaaagcagcctggaggagcccgacttctacaagaccaagatcaaactgtgcatactgctgcacgcgttcaggatccgggccgtcaccatcgaccgggtgatgtcctatctgaatgccagctgataataggctggagcctcggtggccatgcttcttgccccttgggcctccccccagcccctcctccccttcctgcacccgtaccccccaaacaccattgtcacactccagtggtctttgaataaagtctgagtgggcggcaaaaaaaaaaaaaaaaaaaaaaaaaaaaaaaaaaaaaaaaaaaaaaaaaaaaaaaaaaaaaaaaaaaaaaaaaaaaaaaaaaaaaaaaaaaaaaaaaaaatctag

SEQ ID NO: 1151 - RNA, 1890 nt, synthetic construct
  misc_feature 1..1890: note = hIL12AB_033
  modified_base 1: mod_base = m7g
  misc_feature 1..2: note = 5' to 5' triphosphate linkage
  source 1..1890: mol_type = other RNA
ggggaaataagagagaaaagaagagtaagaagaaatataagagccaccatgtgccaccagcagctcgtgattagctggttttcgctggtgttcctggccagccctctcgtggccatctgggagctgaaaaaagacgtgtacgtggtggagctggactggtacccggacgcccccggcgagatggtggtgctgacgtgcgacaccccggaagaggacggcatcacctggaccctggaccagtcatccgaggtcctgggcagcggcaagacgctcaccatccaggtgaaggagttcggcgacgccggccagtacacatgccataagggcggggaggtgctgagccacagcctgctcctcctgcacaagaaggaggatggcatctggtctacagacatcctgaaggaccagaaagagcccaagaacaagaccttcctccggtgcgaggccaagaactactccgggcggtttacttgttggtggctgaccaccatcagcaccgacctcaccttcagcgtgaagagctcccgagggagctccgacccccagggggtcacctgcggcgccgccaccctgagcgccgagcgggtgaggggcgacaacaaggagtatgaatacagcgtggaatgccaagaggacagcgcctgtcccgcggccgaggaaagcctgcccatcgaggtgatggtggacgccgtccacaaactcaagtacgagaactacaccagcagtttcttcattcgcgacatcatcaagccggacccccccaaaaacctgcagctcaaacccctgaagaacagcaggcaggtggaggtcagctgggagtacccggacacctggagcaccccccatagctacttcagcctgaccttctgcgtgcaggtgcagggcaagagcaaacgcgagaagaaggaccgggtgtttaccgacaagaccagcgccacggtgatctgccgaaagaatgcaagcatctccgtgagggcgcaggaccgctactactctagcagctggagcgagtgggccagcgtgccctgcagcggtggcggcggaggcggcagccgtaacctccccgtggccacccccgaccccggcatgttcccgtgtctgcaccactcccagaacctgctgagggccgtcagcaatatgctgcagaaggcccggcagacgctggagttctacccctgcacctccgaggagatcgaccatgaggacattaccaaggacaagacgagcactgtggaggcctgcctgcccctggagctcaccaaaaacgagagctgcctgaatagcagggagacgtccttcatcaccaacggcagctgtctggccagcaggaagaccagcttcatgatggccctgtgcctctcctccatatatgaggatctgaagatgtaccaggtggagttcaagaccatgaacgccaagctgctgatggatcccaagaggcagatcttcctggaccagaatatgctggccgtgattgacgagctgatgcaggccctgaactttaatagcgagaccgtcccccagaagagcagcctggaggagcccgacttctataagaccaagatcaagctgtgcatactgctgcacgcgtttaggataagggccgtcaccatcgacagggtgatgagctacctgaatgccagctgataataggctggagcctcggtggccatgcttcttgccccttgggcctccccccagcccctcctccccttcctgcacccgtaccccccaaacaccattgtcacactccagtggtctttgaataaagtctgagtgggcggcaaaaaaaaaaaaaaaaaaaaaaaaaaaaaaaaaaaaaaaaaaaaaaaaaaaaaaaaaaaaaaaaaaaaaaaaaaaaaaaaaaaaaaaaaaaaaaaaaaaatctag

SEQ ID NO: 1152 - RNA, 1890 nt, synthetic construct
  misc_feature 1..1890: note = hIL12AB_034
  modified_base 1: mod_base = m7g
  misc_feature 1..2: note = 5' to 5' triphosphate linkage
  source 1..1890: mol_type = other RNA
ggggaaataagagagaaaagaagagtaagaagaaatataagagccaccatgtgccaccaacagctggtgatctcctggttcagcctggtgttcctcgccagccccctggtggccatctgggagctgaagaaagacgtgtacgtggtggagctggactggtatcccgacgcccccggcgagatggtcgtgctgacctgcgacaccccggaggaggacggcatcacctggaccctggatcagtcctccgaggtgctgggcagcgggaagaccctgaccatccaggtgaaagagttcggagatgccggccagtatacctgtcacaaggggggtgaggtgctgagccatagcctcttgcttctgcacaagaaggaggacggcatctggtccaccgacatcctcaaggaccaaaaggagccgaagaataaaacgttcctgaggtgcgaagccaagaactattccggacggttcacctgctggtggctgaccaccatcagcaccgacctcaccttctccgtaaagtcaagcaggggcagctccgacccccagggcgtgacctgcggagccgccaccctgagcgcagagagggtgaggggcgacaacaaggagtacgaatactccgtcgagtgccaggaggacagcgcctgccccgccgccgaggaaagtctgcccatcgaggtgatggtggacgccgtgcacaagctcaaatacgagaactacaccagcagcttcttcatccgggatatcatcaagcccgaccctccaaagaatctgcagctgaaaccccttaagaacagcaggcaggtggaggtcagctgggagtaccccgacacctggagcacgccccactcctactttagcctgaccttttgcgtgcaggtgcaggggaaaagcaagcgggagaagaaggacagggtgttcaccgataagacctccgctaccgtgatctgcaggaagaacgcctcaatcagcgtgagggcccaggatcggtactactccagctcctggagcgagtgggccagcgtgccctgctctggcggtggcggcgggggcagccggaacctgccggtggccactcccgacccgggcatgttcccgtgcctccaccattcccagaacctgctgcgggccgtgtccaatatgctccagaaggcaaggcagaccctggagttctacccctgcaccagcgaggagatcgatcacgaggacatcaccaaagacaaaaccagcacggtcgaggcctgcctgcccctggaactcaccaagaacgaaagctgtctcaacagccgcgagaccagcttcataaccaacggttcctgtctggcctcccgcaagaccagctttatgatggccctctgtctgagctccatctatgaagacctgaaaatgtaccaggtggagttcaaaaccatgaacgccaagcttctgatggaccccaagaggcagatcttcctggatcagaacatgctggccgtgatcgacgagctgatgcaggccctgaactttaactccgagaccgtgccccagaaaagcagcctggaagagcccgatttctacaaaacgaagatcaagctgtgcatcctgctgcacgccttccggatccgtgcggtgaccatcgatagggtgatgagctacctgaacgccagctgataataggctggagcctcggtggccatgcttcttgccccttgggcctccccccagcccctcctccccttcctgcacccgtaccccccaaacaccattgtcacactccagtggtctttgaataaagtctgagtgggcggcaaaaaaaaaaaaaaaaaaaaaaaaaaaaaaaaaaaaaaaaaaaaaaaaaaaaaaaaaaaaaaaaaaaaaaaaaaaaaaaaaaaaaaaaaaaaaaaaaaaatctag

SEQ ID NO: 1153 - RNA, 1890 nt, synthetic construct
  misc_feature 1..1890: note = hIL12AB_035
  modified_base 1: mod_base = m7g
  misc_feature 1..2: note = 5' to 5' triphosphate linkage
  source 1..1890: mol_type = other RNA
ggggaaataagagagaaaagaagagtaagaagaaatataagagccaccatgtgccaccaacagctggtaatcagctggttcagcctggttttcctcgcgtcgcccctggtggccatctgggagttaaagaaggacgtgtacgtggtggagctggattggtaccccgacgccccgggcgagatggtcgtgctcacctgcgatacccccgaggaggacgggatcacctggaccctggaccaatccagcgaggtgctgggcagcggcaagaccctgaccatacaggtgaaggaatttggggacgccgggcagtacacctgccacaagggcggggaagtgctgtcccactccctcctgctgctgcataagaaggaggacggcatctggagcaccgacatcctgaaggaccaaaaggagcccaagaacaagaccttcctgaggtgcgaggccaaaaactattccggccgctttacctgttggtggctgaccaccatctccaccgatctgaccttcagcgtgaagtcgtctaggggctcctccgacccccagggcgtaacctgcggcgccgcgaccctgagcgccgagagggtgcggggcgataacaaagagtacgagtactcggtggagtgccaggaggacagcgcctgtccggcggccgaggagagcctgcccatcgaggtgatggtggacgccgtccacaagctgaagtacgagaactacaccagttcgttcttcatcagggacatcatcaagccggacccccccaagaacctccagctgaagcccctgaagaacagcaggcaggtggaagtgtcctgggagtatcccgacacctggagcaccccccacagctacttcagcctgaccttttgcgtgcaggtgcagggcaaaagcaagagggaaaagaaggaccgggtgttcaccgataagacgagcgccaccgttatctgcaggaagaacgcctccataagcgtgagggcgcaggaccgttactacagcagcagctggagtgagtgggcaagcgtgccctgtagcggcgggggcgggggcgggtcccgcaacctccccgtcgccacccccgacccaggcatgtttccgtgcctgcaccacagccagaacctgctgcgggccgttagcaacatgctgcagaaggccaggcagaccctcgagttctatccctgcacatctgaggagatcgaccacgaagacatcactaaggataagacctccaccgtggaggcctgtctgcccctcgagctgaccaagaatgaatcctgcctgaacagccgagagaccagctttatcaccaacggctcctgcctggccagcaggaagacctccttcatgatggccctgtgcctctccagcatctacgaggatctgaagatgtaccaggtagagttcaagacgatgaacgccaagctcctgatggaccccaagaggcagatattcctggaccagaacatgctggcggtgatcgacgagctgatgcaggccctgaatttcaacagcgagacggtgccacagaagtccagcctggaggagccagacttctacaagaccaagatcaaactgtgcatcctcctgcacgcgttcaggatccgcgccgtcaccatagacagggtgatgagttatctgaacgccagctgataataggctggagcctcggtggccatgcttcttgccccttgggcctccccccagcccctcctccccttcctgcacccgtaccccccaaacaccattgtcacactccagtggtctttgaataaagtctgagtgggcggcaaaaaaaaaaaaaaaaaaaaaaaaaaaaaaaaaaaaaaaaaaaaaaaaaaaaaaaaaaaaaaaaaaaaaaaaaaaaaaaaaaaaaaaaaaaaaaaaaaaatctag

SEQ ID NO: 1154 - RNA, 1890 nt, synthetic construct
  misc_feature 1..1890: note = hIL12AB_036
  modified_base 1: mod_base = m7g
  misc_feature 1..2: note = 5' to 5' triphosphate linkage
  source 1..1890: mol_type = other RNA
ggggaaataagagagaaaagaagagtaagaagaaatataagagccaccatgtgccatcagcagctggtaatcagctggtttagcctggtgttcctggccagcccactggtggccatctgggagctgaagaaggacgtgtacgtggtggaactggactggtaccccgacgcccctggcgagatggtggtactgacctgtgacaccccggaggaagacggtatcacctggaccctggatcagagctccgaggtgctgggctccggcaagacactgaccatccaagttaaggaatttggggacgccggccagtacacctgccacaaggggggcgaggtgctgtcccactccctgctgcttctgcataagaaggaggatggcatctggtccaccgacatactgaaggaccagaaggagcccaagaataagaccttcctgagatgcgaggccaagaactactcgggaaggttcacctgctggtggctgaccaccatcagcaccgacctgaccttctccgtgaagagctcccggggcagctccgacccccagggcgtaacctgtggggccgctaccctgtccgccgagagggtccggggcgacaacaaggaatacgagtacagcgtggagtgccaggaggactccgcctgccccgccgccgaggagtcgctgcccatagaggtgatggtggacgccgtgcacaagctcaagtacgagaattacaccagcagcttctttatcagggacataattaagccggaccccccaaagaatctgcagctgaagcccctgaagaatagccggcaggtggaagtgtcctgggagtaccccgacacctggagcaccccccactcctatttctcactgacattctgcgtgcaggtgcaagggaaaagcaagagggagaagaaggatagggtgttcaccgacaagacaagcgccaccgtgatctgccgaaaaaatgccagcatcagcgtgagggcccaggatcggtattacagcagctcctggagcgagtgggccagcgtgccctgttccggcgggggagggggcggctcccggaacctgccggtggccacccccgaccctggcatgttcccctgcctgcatcacagccagaacctgctccgggccgtgtcgaacatgctgcagaaggcccggcagaccctcgagttttacccctgcaccagcgaagagatcgaccacgaagacataaccaaggacaagaccagcacggtggaggcctgcctgcccctggagcttaccaaaaacgagtcctgcctgaacagccgggaaaccagcttcataacgaacgggagctgcctggcctccaggaagaccagcttcatgatggcgctgtgtctgtccagcatatacgaggatctgaagatgtatcaggtggaattcaaaactatgaatgccaagctcctgatggaccccaagaggcagatcttcctggaccagaacatgctagccgtgatcgacgagctgatgcaggccctcaacttcaactcggagacggtgccccagaagtccagcctcgaggagcccgacttctacaagaccaagatcaagctgtgcatactgctgcatgccttcaggataagggcggtgactatcgacagggtcatgtcctacctgaacgccagctgataataggctggagcctcggtggccatgcttcttgccccttgggcctccccccagcccctcctccccttcctgcacccgtaccccccaaacaccattgtcacactccagtggtctttgaataaagtctgagtgggcggcaaaaaaaaaaaaaaaaaaaaaaaaaaaaaaaaaaaaaaaaaaaaaaaaaaaaaaaaaaaaaaaaaaaaaaaaaaaaaaaaaaaaaaaaaaaaaaaaaaaatctag

SEQ ID NO: 1155 - RNA, 1890 nt, synthetic construct
  misc_feature 1..1890: note = hIL12AB_037
  modified_base 1: mod_base = m7g
  misc_feature 1..2: note = 5' to 5' triphosphate linkage
  source 1..1890: mol_type = other RNA
ggggaaataagagagaaaagaagagtaagaagaaatataagagccaccatgtgccaccaacaactggtgatcagctggttctccctggtgttcctggccagccccctggtggccatctgggagctcaaaaaagacgtgtacgtggtggagctcgattggtacccagacgcgccgggggaaatggtggtgctgacctgcgacaccccagaggaggatggcatcacgtggacgctggatcagtccagcgaggtgctggggagcggcaagacgctcaccatccaggtgaaggaatttggcgacgcgggccagtatacctgtcacaagggcggcgaggtgctgagccactccctgctgctgctgcacaagaaggaggatgggatctggtcaaccgatatcctgaaagaccagaaggagcccaagaacaagaccttcctgcgctgcgaggccaagaactatagcggcaggttcacctgctggtggctgaccaccatcagcaccgacctgaccttcagcgtgaaatcctccaggggcagcagcgacccccagggcgtgacctgcggtgccgccacgctctccgccgagcgagtgaggggtgacaacaaggagtacgagtacagcgtggaatgtcaggaggacagcgcctgtcccgccgccgaggagtcgctgcccatcgaggtgatggtcgacgcggtgcacaagctcaaatacgagaattacaccagcagcttcttcatcagggacatcatcaagcccgacccccccaagaacctgcagctgaagcccttgaagaacagcaggcaggtggaggtgagctgggagtacccggacacctggagcaccccccactcctacttcagcctgacgttctgtgtgcaggtgcaggggaagtccaagagggagaagaaggaccgggtgttcaccgacaagaccagcgccaccgtgatatgccgcaagaacgcgtccatcagcgttcgcgcccaggaccgctactacagcagctcctggtccgaatgggccagcgtgccctgcagcggtggagggggcgggggctccaggaatctgccggtggccacccccgaccccgggatgttcccgtgtctgcatcactcccagaacctgctgcgggccgtgagcaatatgctgcagaaggccaggcagacgctcgagttctacccctgcacctccgaagagatcgaccatgaggacatcaccaaggacaagaccagcaccgtggaggcctgcctccccctggagctgaccaaaaacgagagctgcctgaactccagggagaccagctttataaccaacggcagctgcctcgcctccaggaagacctcgtttatgatggccctctgcctgtccagcatctacgaggacctgaagatgtaccaggtggagttcaagaccatgaacgcgaagttgctcatggaccccaagaggcagatcttcctggaccagaacatgctcgcggtgatcgacgagctgatgcaagccctgaacttcaacagcgagaccgtgccccagaagagcagcctggaagagcccgacttctacaagaccaagatcaagctgtgcatcctgctgcacgccttccggatccgggccgtgaccatcgacagggtgatgagctacctcaacgcctcctgataataggctggagcctcggtggccatgcttcttgccccttgggcctccccccagcccctcctccccttcctgcacccgtaccccccaaacaccattgtcacactccagtggtctttgaataaagtctgagtgggcggcaaaaaaaaaaaaaaaaaaaaaaaaaaaaaaaaaaaaaaaaaaaaaaaaaaaaaaaaaaaaaaaaaaaaaaaaaaaaaaaaaaaaaaaaaaaaaaaaaaaatctag

SEQ ID NO: 1156 - RNA, 1890 nt, synthetic construct
  misc_feature 1..1890: note = hIL12AB_038
  modified_base 1: mod_base = m7g
  misc_feature 1..2: note = 5' to 5' triphosphate linkage
  source 1..1890: mol_type = other RNA
ggggaaataagagagaaaagaagagtaagaagaaatataagagccaccatgtgccaccagcagctcgtgatcagctggttctccctcgtcttcctggcctccccgctggtggccatctgggagctgaagaaggacgtgtacgtggtggagctggactggtatcccgacgcccccggcgagatggtggtgctgacgtgcgacacaccagaagaggacgggatcacatggaccctggatcagtcgtccgaggtgctggggagcggcaagaccctcaccatccaagtgaaggagttcggggacgccggccagtacacctgccacaagggcggggaggtgctctcccatagcctgctcctcctgcacaaaaaggaggatggcatctggagcaccgacatcctgaaggaccagaaggagcccaagaacaagacatttctcaggtgtgaggccaagaactattcgggcaggtttacctgttggtggctcaccaccatctctaccgacctgacgttctccgtcaagtcaagcagggggagctcggacccccagggggtgacatgtggggccgccaccctgagcgcggagcgtgtccgcggcgacaacaaggagtacgagtattccgtggagtgccaggaggacagcgcctgccccgccgccgaggagtccctgcccatagaggtgatggtggacgccgtccacaagttgaagtacgaaaattatacctcctcgttcttcattagggacatcatcaagcctgaccccccgaagaacctacaactcaagcccctcaagaactcccgccaggtggaggtgtcctgggagtaccccgacacctggtccaccccgcacagctacttcagcctgaccttctgcgtgcaggtccaggggaagagcaagcgtgaaaagaaagacagggtgttcaccgacaagacgagcgccaccgtgatctgcaggaaaaacgcctccatctccgtgcgcgcccaggacaggtactacagtagctcctggagcgaatgggccagcgtgccgtgcagcggcgggggaggaggcggcagtcgcaacctgcccgtggccacccccgaccccggcatgttcccatgcctgcaccacagccagaacctgctgagggcagtcagcaatatgctgcagaaggccaggcagaccctggagttttatccctgcaccagcgaggagatcgaccacgaggacatcaccaaggacaagacctccaccgtcgaggcctgcctgccactggagctgaccaaaaacgagagctgcctgaactccagggagacctccttcatcaccaacgggagctgcctggccagccggaagaccagcttcatgatggcgctgtgcctcagcagcatctacgaggatctcaagatgtaccaggtggagttcaagaccatgaacgcgaagctgctgatggaccccaagcggcagatcttcctggaccagaacatgctggccgtgattgacgagctcatgcaggccctgaacttcaatagcgagaccgtcccccaaaagagcagcctggaggaacccgacttctacaaaacgaagatcaagctctgcatcctgctgcacgccttccggatccgggccgtgaccatcgatcgtgtgatgagctacctgaacgcctcgtgataataggctggagcctcggtggccatgcttcttgccccttgggcctccccccagcccctcctccccttcctgcacccgtaccccccaaacaccattgtcacactccagtggtctttgaataaagtctgagtgggcggcaaaaaaaaaaaaaaaaaaaaaaaaaaaaaaaaaaaaaaaaaaaaaaaaaaaaaaaaaaaaaaaaaaaaaaaaaaaaaaaaaaaaaaaaaaaaaaaaaaaatctag

SEQ ID NO: 1157 - RNA, 1890 nt, synthetic construct
  misc_feature 1..1890: note = hIL12AB_039
  modified_base 1: mod_base = m7g
  misc_feature 1..2: note = 5' to 5' triphosphate linkage
  source 1..1890: mol_type = other RNA
ggggaaataagagagaaaagaagagtaagaagaaatataagagccaccatgtgccaccagcagctcgtcatctcctggtttagcctggtgtttctggcctcccccctggtcgccatctgggagctgaagaaagacgtgtacgtggtggagctggactggtacccggacgctcccggggagatggtggtgctgacctgcgacacccccgaggaggacggcatcacctggaccctggaccagagctccgaggtgctggggagcggcaagaccctgaccattcaggtgaaagagttcggcgacgccggccaatatacctgccacaaggggggggaggtcctgtcgcattccctgctgctgcttcacaaaaaggaggatggcatctggagcaccgacatcctgaaggaccagaaagaacccaagaacaagacgttcctgcgctgcgaggccaagaactacagcggccggttcacctgttggtggctgaccaccatctccaccgacctgactttctcggtgaagagcagccgcgggagcagcgacccccagggagtgacctgcggcgccgccaccctgagcgccgaaagggtgaggggcgacaataaagagtacgagtattccgtggagtgccaggaggacagcgcctgtcccgccgccgaggagtccctgcctatcgaggtgatggtcgacgcggtgcacaagctcaagtacgaaaactacaccagcagctttttcatcagggatatcatcaaaccagacccccccaagaacctgcagctgaagcccctgaaaaacagcaggcaggtggaagtgagctgggaataccccgatacctggtccaccccccacagctacttcagcctgaccttctgcgtgcaggtgcaggggaagtccaagcgggagaagaaagatcgggtgttcacggacaagaccagcgccaccgtgatttgcaggaaaaacgccagcatctccgtgagggctcaggacaggtactacagctccagctggagcgagtgggcctccgtgccttgcagcgggggaggaggcggcggcagcaggaatctgcccgtcgcaacccccgaccccggcatgttcccctgcctgcaccacagccagaatctgctgcgagccgtgagcaacatgctccagaaggcccggcagacgctggagttctacccctgcacctccgaggagatcgaccacgaggacatcaccaaggataagacgagcaccgtcgaggcctgtctccccctggagctcaccaagaacgagtcctgcctgaatagcagggagacgtccttcataaccaacggcagctgtctggcgtccaggaagaccagcttcatgatggccctctgcctgagctccatctacgaggacctcaagatgtaccaggtcgagttcaagaccatgaacgcaaaactgctcatggatccaaagaggcagatctttctggaccagaacatgctggccgtgatcgatgaactcatgcaggccctgaatttcaattccgagaccgtgccccagaagagctccctggaggaacccgacttctacaaaacaaagatcaagctgtgtatcctcctgcacgccttccggatcagggccgtcaccattgaccgggtgatgtcctacctgaacgccagctgataataggctggagcctcggtggccatgcttcttgccccttgggcctccccccagcccctcctccccttcctgcacccgtaccccccaaacaccattgtcacactccagtggtctttgaataaagtctgagtgggcggcaaaaaaaaaaaaaaaaaaaaaaaaaaaaaaaaaaaaaaaaaaaaaaaaaaaaaaaaaaaaaaaaaaaaaaaaaaaaaaaaaaaaaaaaaaaaaaaaaaaatctag

SEQ ID NO: 1158 - RNA, 1890 nt, synthetic construct
  misc_feature 1..1890: note = hIL12AB_040
  modified_base 1: mod_base = m7g
  misc_feature 1..2: note = 5' to 5' triphosphate linkage
  source 1..1890: mol_type = other RNA
ggggaaataagagagaaaagaagagtaagaagaaatataagagccaccatgtgccatcagcagctggtgatcagctggttcagcctcgtgttcctcgccagccccctcgtggccatctgggagctgaaaaaggacgtgtacgtggtggagctggactggtatcccgacgccccgggcgagatggtggtgctgacctgcgacacccccgaggaggacggcattacctggacactggaccagagcagcgaggtcctgggcagcgggaagaccctgacaattcaggtgaaggagttcggcgacgccggacagtacacgtgccacaaggggggggaggtgctgtcccacagcctcctcctgctgcacaagaaggaggatggcatctggagcaccgacatcctgaaggatcagaaggagcccaagaacaagacctttctgagatgcgaggccaagaattacagcggccgtttcacctgctggtggctcaccaccatcagcaccgacctgaccttcagcgtgaaatcctccaggggctcctccgacccgcagggagtgacctgcggcgccgccacactgagcgccgagcgggtcagaggggacaacaaggagtacgagtacagcgttgagtgccaggaggacagcgcctgtcccgcggccgaggaatccctgcccatcgaggtgatggtggacgcagtgcacaagctgaagtacgagaactatacctcgagcttcttcatccgggatatcattaagcccgatcccccgaagaacctgcagctcaaacccctgaagaacagcaggcaggtggaggtctcctgggagtaccccgacacatggtccaccccccattcctatttctccctgaccttttgcgtgcaggtgcagggcaagagcaagagggagaaaaaggacagggtgttcaccgacaagacctccgccaccgtgatctgccgtaagaacgctagcatcagcgtcagggcccaggacaggtactatagcagctcctggtccgagtgggccagcgtcccgtgcagcggcgggggcggtggaggctcccggaacctccccgtggccaccccggaccccgggatgtttccctgcctgcatcacagccagaacctgctgagggccgtgtccaacatgctgcagaaggccaggcagacactcgagttttacccctgcaccagcgaggagatcgaccacgaagacatcaccaaggacaagacctccaccgtggaggcatgcctgcccctggagctgaccaaaaacgaaagctgtctgaactccagggagacctcctttatcacgaacggctcatgcctggcctccagaaagaccagcttcatgatggccctgtgcctgagctccatctacgaggacttgaaaatgtaccaggtcgagttcaagaccatgaacgccaagctgctcatggaccccaaaaggcagatctttctggaccagaatatgctggccgtgatcgacgagctcatgcaagccctgaatttcaacagcgagaccgtgccccagaagtcctccctggaggagcccgacttctacaagaccaagatcaagctgtgcatactcctgcacgcgtttaggatcagggcggtgaccatcgatagggtgatgagctacctgaatgcctcctgataataggctggagcctcggtggccatgcttcttgccccttgggcctccccccagcccctcctccccttcctgcacccgtaccccccaaacaccattgtcacactccagtggtctttgaataaagtctgagtgggcggcaaaaaaaaaaaaaaaaaaaaaaaaaaaaaaaaaaaaaaaaaaaaaaaaaaaaaaaaaaaaaaaaaaaaaaaaaaaaaaaaaaaaaaaaaaaaaaaaaaaatctag

SEQ ID NO: 1159 - skipped

SEQ ID NO: 1160 - protein, 183 aa, Homo sapiens
MERVQPLEENVGNAARPRFERNKLLLVASVIQGLGLLLCFTYICLHFSALQVSHRYPRIQSIKVQFTEYKKEKGFILTSQKEDEIMKVQNNSVIINCDGFYLISLKGYFSQEVNISLHYQKDEEPLFQLKKVRSVNSLMVASLTYKDKVYLNVTTDNTSLDDFHVNGGELILIHQNPGEFCVL

SEQ ID NO: 1161 - protein, 133 aa, Homo sapiens
MVSHRYPRIQSIKVQFTEYKKEKGFILTSQKEDEIMKVQNNSVIINCDGFYLISLKGYFSQEVNISLHYQKDEEPLFQLKKVRSVNSLMVASLTYKDKVYLNVTTDNTSLDDFHVNGGELILIHQNPGEFCVL

SEQ ID NO: 1162 - protein, 198 aa, Mus musculus
MEGEGVQPLDENLENGSRPRFKWKKTLRLVVSGIKGAGMLLCFIYVCLQLSSSPAKDPPIQRLRGAVTRCEDGQLFISSYKNEYQTMEVQNNSVVIKCDGLYIIYLKGSFFQEVKIDLHFREDHNPISIPMLNDGRRIVFTVVASLAFKDKVYLTVNAPDTLCEHLQINDGELIVVQLTPGYCAPEGSYHSTVNQVPL

SEQ ID NO: 1163 - RNA, 552 nt, Homo sapiens
  source 1..552: mol_type = other RNA
atggaaagggtccaacccctggaagagaatgtgggaaatgcagccaggccaagattcgagaggaacaagctattgctggtggcctctgtaattcagggactggggctgctcctgtgcttcacctacatctgcctgcacttctctgctcttcaggtatcacatcggtatcctcgaattcaaagtatcaaagtacaatttaccgaatataagaaggagaaaggtttcatcctcacttcccaaaaggaggatgaaatcatgaaggtgcagaacaactcagtcatcatcaactgtgatgggttttatctcatctccctgaagggctacttctcccaggaagtcaacattagccttcattaccagaaggatgaggagcccctcttccaactgaagaaggtcaggtctgtcaactccttgatggtggcctctctgacttacaaagacaaagtctacttgaatgtgaccactgacaatacctccctggatgacttccatgtgaatggcggagaactgattcttatccatcaaaatcctggtgaattctgtgtcctttga

SEQ ID NO: 1164 - RNA, 3484 nt, Homo sapiens
  source 1..3484: mol_type = other RNA
ggccctgggacctttgcctattttctgattgataggctttgttttgtctttacctccttctttctggggaaaacttcagttttatcgcacgttccccttttccatatcttcatcttccctctacccagattgtgaagatggaaagggtccaacccctggaagagaatgtgggaaatgcagccaggccaagattcgagaggaacaagctattgctggtggcctctgtaattcagggactggggctgctcctgtgcttcacctacatctgcctgcacttctctgctcttcaggtatcacatcggtatcctcgaattcaaagtatcaaagtacaatttaccgaatataagaaggagaaaggtttcatcctcacttcccaaaaggaggatgaaatcatgaaggtgcagaacaactcagtcatcatcaactgtgatgggttttatctcatctccctgaagggctacttctcccaggaagtcaacattagccttcattaccagaaggatgaggagcccctcttccaactgaagaaggtcaggtctgtcaactccttgatggtggcctctctgacttacaaagacaaagtctacttgaatgtgaccactgacaatacctccctggatgacttccatgtgaatggcggagaactgattcttatccatcaaaatcctggtgaattctgtgtcctttgaggggctgatggcaatatctaaaaccaggcaccagcatgaacaccaagctgggggtggacagggcatggattcttcattgcaagtgaaggagcctcccagctcagccacgtgggatgtgacaagaagcagatcctggccctcccgcccccacccctcagggatatttaaaacttattttatataccagttaatcttatttatccttatattttctaaattgcctagccgtcacaccccaagattgccttgagcctactaggcacctttgtgagaaagaaaaaatagatgcctcttcttcaagatgcattgtttctattggtcaggcaattgtcataataaacttatgtcattgaaaacggtacctgactaccatttgctggaaatttgacatgtgtgtggcattatcaaaatgaagaggagcaaggagtgaaggagtggggttatgaatctgccaaaggtggtatgaaccaacccctggaagccaaagcggcctctccaaggttaaattgattgcagtttgcatattgcctaaatttaaactttctcatttggtgggggttcaaaagaagaatcagcttgtgaaaaatcaggacttgaagagagccgtctaagaaataccacgtgctttttttctttaccattttgctttcccagcctccaaacatagttaatagaaatttcccttcaaagaactgtctggggatgtgatgctttgaaaaatctaatcagtgacttaagagagattttcttgtatacagggagagtgagataacttattgtgaagggttagctttactgtacaggatagcagggaactggacatctcagggtaaaagtcagtacggattttaatagcctggggaggaaaacacattctttgccacagacaggcaaagcaacacatgctcatcctcctgcctatgctgagatacgcactcagctccatgtcttgtacacacagaaacattgctggtttcaagaaatgaggtgatcctattatcaaattcaatctgatgtcaaatagcactaagaagttattgtgccttatgaaaaataatgatctctgtctagaaataccatagaccatatatagtctcacattgataattgaaactagaagggtctataatcagcctatgccagggcttcaatggaatagtatccccttatgtttagttgaaatgtccccttaacttgatataatgtgttatgcttatggcgctgtggacaatctgatttttcatgtcaactttccagatgatttgtaacttctctgtgccaaaccttttataaacataaatttttgagatatgtattttaaaattgtagcacatgtttccctgacattttcaatagaggatacaacatcacagaatctttctggatgattctgtgttatcaaggaattgtactgtgctacaattatctctagaatctccagaaaggtggagggctgttcgcccttacactaaatggtctcagttggatttttttttcctgttttctatttcctcttaagtacaccttcaactatattcccatccctctattttaatctgttatgaaggaaggtaaataaaaatgctaaatagaagaaattgtaggtaaggtaagaggaatcaagttctgagtggctgccaaggcactcacagaatcataatcatggctaaatatttatggagggcctactgtggaccaggcactgggctaaatacttacatttacaagaatcattctgagacagatattcaatgatatctggcttcactactcagaagattgtgtgtgtgtttgtgtgtgtgtgtgtgtgtgtatttcactttttgttattgaccatgttctgcaaaattgcagttactcagtgagtgatatccgaaaaagtaaacgtttatgactataggtaatatttaagaaaatgcatggttcatttttaagtttggaatttttatctatatttctcacagatgtgcagtgcacatgcaggcctaagtatatgttgtgtgtgttgtttgtctttgatgtcatggtcccctctcttaggtgctcactcgctttgggtgcacctggcctgctcttcccatgttggcctctgcaaccacacagggatatttctgctatgcaccagcctcactccaccttccttccatcaaaaatatgtgtgtgtgtctcagtccctgtaagtcatgtccttcacagggagaattaacccttcgatatacatggcagagttttgtgggaaaagaattgaatgaaaagtcaggagatcagaattttaaatttgacttagccactaactagccatgtaaccttgggaaagtcatttcccatttctgggtcttgcttttctttctgttaaatgagaggaatgttaaatatctaacagtttagaatcttatgcttacagtgttatctgtgaatgcacatattaaatgtctatgttcttgttgctatgagtcaaggagtgtaaccttctcctttactatgttgaatgtatttttttctggacaagcttacatcttcctcagccatctttgtgagtccttcaagagcagttatcaattgttagttagatattttctatttagagaatgcttaagggattccaatcccgatccaaatcataatttgttcttaagtatactgggcaggtcccctattttaagtcataattttgtatttagtgctttcctggctctcagagagtattaatattgatattaataatatagttaatagtaatattgctatttacatggaaacaaataaaagatctcagaattcactaaaaaaaaaaa

SEQ ID NO: 1165 - RNA, 1609 nt, Mus musculus
  source 1..1609: mol_type = other RNA
attgctttttgtctcctgttctgggacctttatcttctgacccgcaggcttgactttgcccttattggctcctttgtggtgaagagcagtcttcccccaggttccccgccacagctgtatctcctctgcaccccgactgcagagatggaaggggaaggggttcaacccctggatgagaatctggaaaacggatcaaggccaagattcaagtggaagaagacgctaaggctggtggtctctgggatcaagggagcagggatgcttctgtgcttcatctatgtctgcctgcaactctcttcctctccggcaaaggaccctccaatccaaagactcagaggagcagttaccagatgtgaggatgggcaactattcatcagctcatacaagaatgagtatcaaactatggaggtgcagaacaattcggttgtcatcaagtgcgatgggctttatatcatctacctgaagggctcctttttccaggaggtcaagattgaccttcatttccgggaggatcataatcccatctctattccaatgctgaacgatggtcgaaggattgtcttcactgtggtggcctctttggctttcaaagataaagtttacctgactgtaaatgctcctgatactctctgcgaacacctccagataaatgatggggagctgattgttgtccagctaacgcctggatactgtgctcctgaaggatcttaccacagcactgtgaaccaagtaccactgtgaattccactctgagggtggacgggacacaggttctttctcgagagagatgagtgcatcctgctcatgagatgtgactgaatgcagagcctaccctacttcctcactcagggatatttaaatcatgtcttacataacagttgacctctcattcccaggattgccttgagcctgctaagagctgttctgggaatgaaaaaaaaaataaatgtctcttcaagacacattgcttctgtcggtcagaagctcatcgtaataaacatctgccactgaaaatggcgcttgattgctatcttctagaattttgatgttgtcaaaagaaagcaaaacatggaaagggtggtgtccaccggccagtaggagctggagtgctctcttcaaggttaaggtgatagaagtttacatgttgcctaaaactgtctctcatctcatggggggcttggaaagaagattaccccgtggaaagcaggacttgaagatgactgtttaagcaacaaggtgcactcttttcctggcccctgaatacacataaaagacaacttccttcaaagaactacctagggactatgatacccaccaaagaaccacgtcagcgatgcaaagaaaaccaggagagctttgtttattttgcagagtatacgagagattttaccctgagggctatttttattatacaggatgagagtgaactggatgtctcaggataaaggccaagaaggatttttcacagtctgagcaagactgtttttgtaggttctctctccaaaacttttaggtaaatttttgataattttaaaatttttagttatatttttggaccattttcaatagaagattgaaacatttccagatggtttcatatccccacaag

SEQ ID NO: 1166 - RNA, 552 nt, synthetic construct
  misc_feature 1..552: note = Codon-optimized sequence 1 for ENSP 281834
  source 1..552: mol_type = other RNA
atggagagagtgcagcccctggaggagaacgtgggcaacgccgccagacccagattcgagagaaacaagctgctgctggtggccagcgtgatccagggcctgggcctgctgctgtgcttcacctacatctgcctgcacttcagcgccctgcaggtgagccacagataccccagaatccagagcatcaaggtgcagttcaccgagtacaagaaggagaagggcttcatcctgaccagccagaaggaggacgagatcatgaaggtgcagaacaacagcgtgatcatcaactgcgacggcttctacctgatcagcctgaagggctacttcagccaggaggtgaacatcagcctgcactaccagaaggacgaggagcccctgttccagctgaagaaggtgagaagcgtgaacagcctgatggtggccagcctgacctacaaggacaaggtgtacctgaacgtgaccaccgacaacaccagcctggacgacttccacgtgaacggcggcgagctgatcctgatccaccagaaccccggcgagttctgcgtgctgtag

SEQ ID NO: 1167 - RNA, 552 nt, synthetic construct
  misc_feature 1..552: note = Codon-optimized sequence 2 for ENSP 281834
  source 1..552: mol_type = other RNA
atggagcgtgtgcagcctcttgaggagaatgtgggaaatgcagcccggcctcgattcgaacgtaataaactcctgctcgtggcctccgtgatccagggtctcggtttattgctgtgttttacctatatatgcttacactttagtgcattacaggtctcacaccggtaccctcgcattcagtctataaaagtgcagtttaccgagtataagaaggagaaaggttttatactgacttctcagaaagaggacgagatcatgaaggtgcagaataatagcgtcattatcaactgcgatggattctatctaatttccctaaaggggtacttcagccaggaggtcaatatatcactgcactatcaaaaggacgaggagcccctgtttcaactgaagaaagtgcgatcagttaactctctgatggttgcctctctgacctataaggacaaagtctacttgaacgtgacaactgacaacacctcactggatgactttcatgtgaatgggggggaactgattcttatccatcagaatccaggagaattctgtgtgctctag

SEQ ID NO: 1168 - RNA, 552 nt, synthetic construct
  misc_feature 1..552: note = Codon-optimized sequence 3 for ENSP 281834
  source 1..552: mol_type = other RNA
atggagcgggtgcagcccctggaggagaatgtgggcaatgctgcccggcccaggtttgaaagaaacaagctgctgctggtggccagcgtcatccagggcctgggcctgctgctgtgcttcacctacatctgcctgcacttcagcgccctgcaggtgagccaccgctacccccgcatccagagcatcaaggtgcagttcacagagtacaagaaggagaagggcttcatcctgaccagccagaaggaggatgagatcatgaaggtgcagaacaacagcgtcatcatcaactgtgatggcttctacctgatcagcctgaagggctacttcagccaggaggtgaacatcagcctgcactaccagaaggatgaggagcccctcttccagctgaagaaggtgcgctctgtgaacagcctgatggtggccagcctgacctacaaggacaaggtgtacctgaatgtgaccacagacaacaccagcctggatgacttccacgtgaatggaggagagctgatcctgatccaccagaaccctggagagttctgtgtgctgtag

SEQ ID NO: 1169 - RNA, 552 nt, synthetic construct
  misc_feature 1..552: note = Codon-optimized sequence 4 for ENSP 281834
  source 1..552: mol_type = other RNA
atggagcgggtgcagcccctggaggagaacgtgggcaacgccgcccgcccgcgttttgagcgaaataagttactgcttgttgcatctgtgatacaggggttgggtttacttctttgctttacatatatttgtctccactttagtgcgcttcaggtatcccatcggtacccgcgcatccagtcaatcaaggtccagttcactgaatataaaaaggagaaaggattcattctgacttcacaaaaagaggacgaaatcatgaaagtgcagaacaactctgtaattataaactgcgatgggttctatctgatcagtctgaagggatattttagccaggaagtaaatatttcactacattatcagaaggacgaagaaccactttttcaactgaagaaagtccggtccgtgaactccctgatggttgctagccttacctacaaggataaagtctatttaaacgtcacaacagataacactagcctcgacgatttccatgtgaacggaggtgaactgatattgatccatcaaaaccccggcgagttctgcgttttatag

SEQ ID NO: 1170 - RNA, 552 nt, synthetic construct
  misc_feature 1..552: note = Codon-optimized sequence 5 for ENSP 281834
  source 1..552: mol_type = other RNA
atggagcgggtccagcccctcgaggagaacgttggtaatgccgcacgtcccaggtttgaacgcaacaagctgctgttggtggccagcgtcattcaggggctgggtttgttgctgtgcttcacttacatctgtctgcattttagtgcactccaggtgtcccaccgctacccccgtatccaatccattaaagtccaatttaccgaatacaaaaaagagaagggtttcattcttacctcccagaaggaggatgaaattatgaaggtgcagaacaattctgttatcatcaactgtgacggattctatctgatttcactgaagggatacttttcccaggaggtgaacatcagtctgcattatcagaaggacgaagaaccgctttttcaactgaagaaggttaggagtgtgaactccttaatggtagccagcctgacatataaggacaaggtatatctgaacgtcaccactgataacacctctttagacgattttcatgtaaatgggggagaattgatactcattcaccagaatccgggtgagttttgtgttctgtag

SEQ ID NO: 1171 - RNA, 402 nt, synthetic construct
  misc_feature 1..402: note = Codon-optimized sequence 1 for ENSP 356691
  source 1..402: mol_type = other RNA
atggtgagccacagataccccagaatccagagcatcaaggtgcagttcaccgagtacaagaaggagaagggcttcatcctgaccagccagaaggaggacgagatcatgaaggtgcagaacaacagcgtgatcatcaactgcgacggcttctacctgatcagcctgaagggctacttcagccaggaggtgaacatcagcctgcactaccagaaggacgaggagcccctgttccagctgaagaaggtgagaagcgtgaacagcctgatggtggccagcctgacctacaaggacaaggtgtacctgaacgtgaccaccgacaacaccagcctggacgacttccacgtgaacggcggcgagctgatcctgatccaccagaaccccggcgagttctgcgtgctgtag

SEQ ID NO: 1172 - RNA, 402 nt, synthetic construct
  misc_feature 1..402: note = Codon-optimized sequence 2 for ENSP 356691
  source 1..402: mol_type = other RNA
atggtttctcaccgttacccacggatccagtctatcaaggttcagtttaccgagtacaaaaaggaaaaagggttcatcctcacctctcagaaagaggacgaaatcatgaaggtgcagaataactctgtaatcattaattgcgacggtttttatctgatttcactgaagggctactttagtcaggaagttaatattagtttgcactaccaaaaggacgaggagcctctcttccaactaaaaaaggtaagatccgttaattcccttatggtggcctccttaacttataaggacaaggtgtatctgaatgtgaccacagataacacatccctggacgactttcatgtaaatggcggcgagttaattctgatacaccagaaccctggcgagttctgcgtgctgtag

SEQ ID NO: 1173 - RNA, 402 nt, synthetic construct
  misc_feature 1..402: note = Codon-optimized sequence 3 for ENSP 356691
  source 1..402: mol_type = other RNA
atggtgagccaccgctacccccgcatccagagcatcaaggtgcagttcacagagtacaagaaggagaagggcttcatcctgaccagccagaaggaggatgagatcatgaaggtgcagaacaacagcgtcatcatcaactgtgatggcttctacctgatcagcctgaagggctacttcagccaggaggtgaacatcagcctgcactaccagaaggatgaggagcccctcttccagctgaagaaggtgcgctctgtgaacagcctgatggtggccagcctgacctacaaggacaaggtgtacctgaatgtgaccacagacaacaccagcctggatgacttccacgtgaatggaggagagctgatcctgatccaccagaaccctggagagttctgtgtgctgtag

SEQ ID NO: 1174 - RNA, 402 nt, synthetic construct
  misc_feature 1..402: note = Codon-optimized sequence 4 for ENSP 356691
  source 1..402: mol_type = other RNA
atggtgagccaccggtacccccggatccagagcatcaaggtgcagttcaccgaatacaagaaggagaagggttttatcctgacgagccagaaggaagacgagattatgaaggtccaaaacaactcagtcatcataaactgcgatggattttacctgatctctctgaaagggtacttctcccaggaagtgaatattagcttgcactatcaaaaagatgaggagcctctattccagctcaagaaggtcagaagcgtcaatagtctgatggtcgcatcattaacctataaagacaaagtatatctaaatgtgacgacagacaatacatccctcgatgattttcacgtcaacggaggcgaactcattctgatccaccagaatccaggggaattttgcgtgctgtag

SEQ ID NO: 1175 - RNA, 402 nt, synthetic construct
  misc_feature 1..402: note = Codon-optimized sequence 5 for ENSP 356691
  source 1..402: mol_type = other RNA
atggtctcacaccggtacccccgtatccagagtattaaggtgcaattcacggagtataaaaaagaaaagggattcattctgacgtctcagaaggaagatgagatcatgaaggtccagaacaattctgtgatcattaattgcgatggattttatctgatttcacttaaaggatatttttcccaggaggttaatatcagtttgcactatcagaaagacgaggagccattattccagctgaagaaggtgagatcagtgaatagcctgatggttgcgtcactgacgtataaagacaaagtttatctaaacgttaccactgataatacatcccttgatgattttcatgtgaacgggggtgaactgatccttatacaccagaaccccggagagttctgtgtgttgtag

SEQ ID NO: 1176 - RNA, 402 nt, synthetic construct; identical to SEQ ID NO: 1171
  misc_feature 1..402: note = Codon-optimized sequence 1 for ENSP 439704
  source 1..402: mol_type = other RNA

SEQ ID NO: 1177 - RNA, 402 nt, synthetic construct
  misc_feature 1..402: note = Codon-optimized sequence 2 for ENSP 439704
  source 1..402: mol_type = other RNA
atggtgtcacaccggtaccctcggatccagtctattaaagttcaatttacggagtacaagaaagaaaaaggctttatccttacaagccaaaaggaagacgagatcatgaaagtgcaaaacaacagtgtgattataaattgtgatggcttctaccttattagtctgaagggctactttagtcaggaagtcaatattagcctacactaccagaaagacgaggagcccctctttcaactgaaaaaggtgcgctccgtgaattcgttgatggtcgcctctctgacctacaaagataaggtgtatcttaacgttactaccgacaatactagtctggacgactttcacgtcaacggaggcgaacttattctgatccaccagaaccccggcgaattctgcgtgctgtag

SEQ ID NO: 1178 - RNA, 402 nt, synthetic construct; identical to SEQ ID NO: 1173
  misc_feature 1..402: note = Codon-optimized sequence 3 for ENSP 439704
  source 1..402: mol_type = other RNA

SEQ ID NO: 1179 - RNA, 402 nt, synthetic construct
  misc_feature 1..402: note = Codon-optimized sequence 4 for ENSP 439704
  source 1..402: mol_type = other RNA
atggtgagccaccggtacccccggatccagagcatcaaggtgcagttcacagagtacaagaaggagaagggatttattctcacaagtcagaaagaagatgagatcatgaaggttcagaacaactcagtcattattaattgcgacggattctatctcattagcctcaaaggctatttcagccaggaggtcaatatcagcctgcactaccagaaggatgaggaacctctctttcagctgaaaaaagtccgctctgtgaattccctcatggtcgcttccctgacctacaaggataaagtttatttgaacgttacaacagataatacatcgctggacgacttccatgtgaatggtggcgaactaattctaatacaccaaaatccaggcgaattttgtgtcctttag

SEQ ID NO: 1180 - RNA, 402 nt, synthetic construct
  misc_feature 1..402: note = Codon-optimized sequence 5 for ENSP 439704
  source 1..402: mol_type = other RNA
atggtatcccatagatacccacgtattcaaagcattaaggtgcagttcacagagtacaaaaaggagaagggtttcatactgacgtcacagaaggaggacgagataatgaaggtgcagaataatagtgtgatcatcaattgtgatggattctatttgatcagcctcaaaggttatttctcacaggaagtcaacatttccctgcactaccagaaggacgaagagcctttgtttcagctgaagaaggtgcgctcagtgaacagtttgatggtagcctccctaacttataaagataaagtttatctgaacgtgacaaccgataacacatccctggacgactttcacgtcaatggaggtgagttaatcctgatccatcagaatcccggagaattctgcgttctttag

SEQ ID NO: 1181 - RNA, 549 nt, synthetic construct
  misc_feature 1..549: note = Codon-optimized sequence OX40L-CO1
  source 1..549: mol_type = other RNA
atggagagggtccagcccctagaggagaacgtaggcaacgccgcccgacccaggttcgagcgcaacaagctcctcctggtcgccagcgtcatccaaggcctcggcctcctcttgtgcttcacctacatctgcctccacttcagcgccctccaggtgtcgcacaggtacccgaggattcagagcatcaaagtacagttcaccgagtacaagaaggagaagggcttcatcctcacctcccagaaggaggacgagattatgaaggtccagaacaatagcgtcatcatcaactgcgacggcttctatctgatcagcctgaagggctacttctcccaagaagtaaacatcagcctgcactaccagaaggacgaggagccactcttccagctgaaaaaggtgaggtccgtcaacagcctgatggtggcctccttgacatacaaggacaaggtgtacctgaacgtgaccacggataacaccagcctggatgacttccatgtcaacggcggcgagctgatcctgatccaccaaaaccccggcgagttctgcgtgctg

SEQ ID NO: 1182 - RNA, 549 nt, synthetic construct
  misc_feature 1..549: note = Codon-optimized sequence OX40L-CO2
  source 1..549: mol_type = other RNA
atggagagggtccagccccttgaggagaacgtagggaacgcagcccgcccgaggttcgagaggaacaagctcctcttggtcgcctcggttatccagggactcgggctccttctctgcttcacgtacatctgccttcacttttcggccctacaggtaagccacaggtaccccaggatccagagcatcaaggtccagttcaccgagtataagaaggaaaaggggttcatcctcacctcccagaaggaggacgagatcatgaaggtccagaacaacagcgtcatcattaattgcgacggcttttacctcatcagcctgaagggatacttcagccaggaggtgaacatcagcctgcattaccagaaggacgaagaacccctgttccagctgaagaaggtgcgctcggtcaactccctgatggtggccagcctgacctacaaggacaaggtgtacctgaacgtgacgaccgacaacaccagcctggatgattttcacgtgaacgggggcgagctgatcctgatccaccagaaccccggcgagttctgcgtgctg

SEQ ID NO: 1183 - RNA, 549 nt, synthetic construct
  misc_feature 1..549: note = Codon-optimized sequence OX40L-CO3
  source 1..549: mol_type = other RNA
atggagagggtacagcccctagaggagaacgtcgggaacgccgctcggccccggttcgaacgcaacaagctcctcctcgtcgcgagcgtcatccagggcctcgggctcttgctttgcttcacctacatttgcctccactttagcgcgctccaggtgtcgcacaggtacccgcgaatacagagcatcaaggtccagttcaccgagtacaaaaaagagaaggggttcatcctcaccagccagaaggaggacgagatcatgaaggtccagaacaacagcgtcatcatcaactgtgacggcttctacctcatcagcctgaagggctacttcagccaggaggtcaacatcagcctccactaccagaaggacgaggagcccctgttccagctgaagaaggtcaggagcgtcaacagcctgatggtggcgagcctgacctacaaagacaaggtctatctgaatgtgaccaccgacaataccagcctggatgacttccacgtgaacggcggagagctcatcctgatccatcagaaccccggggagttttgcgtcctc

SEQ ID NO: 1184 - RNA, 549 nt, synthetic construct
  misc_feature 1..549: note = Codon-optimized sequence OX40L-CO4
  source 1..549: mol_type = other RNA
atggagagagtccagccactcgaggagaacgtggggaacgcggccaggcccaggttcgagaggaataagctcctcctcgtcgcgtcggtcatccagggccttggactccttttgtgcttcacctacatctgcttgcacttctccgcccttcaggtcagccacaggtacccccgcatccagagcatcaaggtccaatttaccgagtacaagaaggagaagggattcatcctcacctcccagaaggaggacgaaataatgaaggtccagaacaactccgtcataatcaactgcgacgggttctacctgatcagcctgaagggctacttcagccaggaggtgaacatcagcctccattaccagaaggacgaggagccgctatttcagcttaagaaggtgcggtccgtgaacagcctgatggtggccagcctcacctataaggacaaagtgtacctgaacgtgaccacggacaacaccagcctggacgacttccacgtgaacgggggcgagctgatcctgatccaccagaaccccggggaattctgcgtgctg

SEQ ID NO: 1185 - RNA, 549 nt, synthetic construct
  misc_feature 1..549: note = Codon-optimized sequence OX40L-CO5
  source 1..549: mol_type = other RNA
atggagagggtacagcccctcgaggagaacgtcgggaacgccgcccggccccggttcgagaggaacaagcttcttctcgtcgccagcgtaatccagggcctagggctcctcctctgcttcacctatatctgcctccacttctccgcgctccaggtcagccatcggtaccccaggatccagagcataaaggtccaattcaccgagtacaaaaaggagaagggttttatcctcacaagccagaaggaggacgagatcatgaaggtccagaacaacagcgtcataatcaactgcgacgggttctacctgatctccctgaaaggctacttcagccaggaggtgaacatcagcctccactaccagaaggacgaggagcccctgttccagctcaagaaggtcaggtccgtcaacagcctgatggtggccagcctgacctacaaggacaaggtgtatctgaacgtgaccaccgacaacaccagcctggacgactttcatgtcaacgggggcgagctgatcctgatccaccagaacccaggcgagttctgcgtcctg

SEQ ID NO: 1186 - RNA, 549 nt, synthetic construct
  misc_feature 1..549: note = Codon-optimized sequence OX40L-CO6
  source 1..549: mol_type = other RNA
atggagagggtccagccactagaggagaacgtaggtaacgccgctaggcccaggttcgagcgtaacaagctcctgctcgttgcctccgttatccagggcctcgggctcctcctctgcttcacttatatctgcctccacttctccgccctccaggtcagccaccggtacccgaggatccagtccatcaaggttcagttcaccgagtacaagaaggagaaaggcttcatactcaccagccagaaggaggacgagatcatgaaggtccagaataactccgtcatcatcaactgtgacggcttctacctcatctcgctgaagggctacttttcccaggaggtgaacatcagcctgcactaccagaaggacgaggagcccctgttccagctgaagaaggtgcggtccgtgaacagcctgatggtggcgagcctgacctacaaggacaaggtgtatctgaatgtcaccaccgacaacaccagcctggacgacttccatgtgaacggcggcgagctgatcctgatccaccaaaatccgggcgagttttgcgtgctc

SEQ ID NO: 1187 - RNA, 549 nt, synthetic construct
  misc_feature 1..549: note = Codon-optimized sequence OX40L-CO7
  source 1..549: mol_type = other RNA
atggagagggtccagccgctcgaagaaaacgtgggcaacgccgcccggcccaggttcgagaggaacaagctcctcctcgtagcatcagtcatccagggactcggccttttgctctgcttcacctacatctgcctccacttcagcgccttgcaggtgtcgcacaggtaccccaggatccagagcatcaaggtccagttcaccgaatacaagaaggagaaggggttcattctcaccagccagaaggaggacgaaatcatgaaggtccagaacaactccgtcatcatcaactgcgacggattctacctgatcagcctgaaaggctacttcagccaggaggtgaatatcagcctccactaccaaaaggacgaagaacccctgtttcagctcaagaaggtgcggtccgtgaattccctcatggtcgccagcctgacgtacaaggacaaggtgtacctgaacgtgaccaccgataatacgtcgctggatgactttcacgtaaacgggggcgaactgatcctgatccaccagaaccctggcgagttctgtgtgctg

SEQ ID NO: 1188 - RNA, 549 nt, synthetic construct
  misc_feature 1..549: note = Codon-optimized sequence OX40L-CO8
  source 1..549: mol_type = other RNA
atggagagggtccagccgctagaggagaacgtcggcaacgcggccaggcccaggttcgagaggaacaagctcctactcgttgccagtgtgatccagggcctcgggctcctcctttgcttcacatacatctgcctccacttcagcgccctccaggtgtcgcataggtaccccaggatccagtccatcaaggtccagttcacggaatataagaaggagaagggatttatcctcacctcccagaaggaggacgagatcatgaaggtccagaacaacagcgtcatcatcaactgcgacgggttctacctgatcagcctgaagggctacttcagccaagaggtgaatatcagcctgcactaccagaaggacgaggagcccctgttccagctcaagaaggtccggagcgtgaacagcctgatggtcgccagcctgacgtacaaagacaaggtgtacctgaacgtgactacggacaacaccagcctggacgacttccacgtgaacggcggggagctgatcctgatccaccagaaccccggggagttctgcgtgctg

SEQ ID NO: 1189 - RNA, 549 nt, synthetic construct
  misc_feature 1..549: note = Codon-optimized sequence OX40L-CO9
  source 1..549: mol_type = other RNA
atggaacgggtccagcccctcgaggagaacgtaggcaacgccgccaggcccaggttcgagcggaacaagctcctcctcgtcgcctcggtcatccagggcctcgggctcctcctttgcttcacctatatctgccttcacttctccgccctccaggtgtcccaccggtacccccggatccagtccatcaaggtccagttcaccgagtataagaaagagaagggattcatcctcacctctcagaaggaggacgagatcatgaaggttcagaacaacagcgtcatcatcaactgcgacggcttctatctgatcagcctgaagggctacttcagccaagaagtcaacatcagcctgcactaccagaaggacgaggagcccctgttccagctgaagaaggtcaggagcgtgaactccctgatggtggcgagcctgacctacaaggacaaggtgtacctgaacgtgaccaccgacaataccagcctggatgacttccacgtgaacggcggcgagctcatcctgatccaccagaaccccggcgagttctgcgtgctg

SEQ ID NO: 1190 - RNA, 549 nt, synthetic construct
  misc_feature 1..549: note = Codon-optimized sequence OX40L-CO10
  source 1..549: mol_type = other RNA
atggagagggttcagcccctagaggaaaacgtcggcaacgcggccaggccccggttcgagaggaataagctcctcctcgtggcgtcggtcatccagggcctcggcctcctcttgtgcttcacctacatctgcctccatttcagcgccctccaggtcagccacaggtaccccaggatccagagcatcaaggtccagttcaccgagtacaagaaggagaagggcttcatcctcaccagccagaaggaggacgagatcatgaaggtccagaacaattcagtcatcatcaactgcgacggcttctacctgatctccctgaagggatacttcagccaggaggtgaacatcagcctccactaccagaaggatgaggagccgctgttccagctgaaaaaggtgaggtccgtgaactccctgatggtcgcctcgctgacctataaggacaaggtctacctgaacgtgaccaccgacaacacgagcctcgacgattttcacgtcaacgggggagagctcattctaatccaccagaaccccggcgagttctgcgtgctg

SEQ ID NO: 1191 - RNA, 549 nt, synthetic construct
  misc_feature 1..549: note = Codon-optimized sequence OX40L-CO11
  source 1..549: mol_type = other RNA
atggagagggtccagcccctagaagagaacgtcggcaacgccgcccgccccaggttcgagaggaacaagctcctcctagtcgcttccgtcatccagggccttgggctcctcctctgcttcacctatatctgcctccacttcagcgccctccaggtgtcccaccgctacccgcggatccaatccatcaaggtccagttcacggagtataaaaaggaaaaagggttcatcctcacctcccagaaggaagacgagatcatgaaggtccagaacaactccgtcatcatcaactgcgacggcttctacctgatctccctgaagggttatttcagccaggaggtgaacatcagcctgcactaccagaaagacgaggagccgctgttccagctgaaaaaggtgcggtccgtgaacagcctgatggtggcctccctcacctacaaggacaaggtatacctgaacgtgaccacggacaacaccagcctggacgacttccatgtgaacggaggagagctgatcctgatccatcagaaccccggcgagttttgcgtgctc

SEQ ID NO: 1192 - RNA, 549 nt, synthetic construct
  misc_feature 1..549: note = Codon-optimized sequence OX40L-CO12
  source 1..549: mol_type = other RNA
atggagagggtacagcctctcgaagagaacgttggcaacgccgcccggccccggttcgagcggaacaaacttctcctcgtagccagcgtcatacaggggctaggcctcctactatgcttcacctacatctgcctccacttctcggccctacaggtgtcccacaggtacccccgtatccagagcatcaaggtccagttcaccgagtacaagaaggagaagggcttcatcttgacctcccagaaggaggacgagatcatgaaggtccagaacaactccgtcatcatcaattgcgacggcttctacctcatcagcctgaaggggtacttcagccaagaggtgaacatctccctgcactatcagaaggacgaggagcccctgttccagctgaagaaggtgcgaagcgtgaactccctgatggtcgccagcttgacctataaggataaggtctacctgaacgtgaccaccgataatacctccctcgatgacttccacgtcaacggaggggagcttatcctgatccaccagaatcccggggagttctgcgtgctg

SEQ ID NO: 1193 - RNA, 549 nt, synthetic construct
  misc_feature 1..549: note = Codon-optimized sequence OX40L-CO13
  source 1..549: mol_type = other RNA
atggagagggtccagccgctcgaggagaacgtaggcaacgccgccaggccgaggttcgagaggaacaaactcctactcgtggcctccgtcatacagggcctaggtctgctcctctgtttcacctatatctgccttcacttcagcgccctccaggtgtcgcaccgatatcccaggatccagagtatcaaggttcagttcaccgagtacaagaaggagaagggctttatccttacctcccagaaggaggacgagatcatgaaggtccagaataacagcgtcatcatcaattgtgacgggttctacctcatcagcctgaaggggtacttctcccaggaagtgaacatttccctgcactaccagaaagatgaagaacccctgtttcagctgaaaaaggtgcgctccgtgaacagcctgatggtggccagcctgacgtacaaggacaaggtgtatctgaacgtgaccaccgacaacaccagcctggatgatttccacgtcaacgggggtgagctgatcctgatacaccagaacccgggcgagttttgtgtgctg

SEQ ID NO: 1194 - RNA, 549 nt, synthetic construct
  misc_feature 1..549: note = Codon-optimized sequence OX40L-CO14
  source 1..549: mol_type = other RNA
atggagagggtccagcccctcgaagagaacgtcggcaacgccgccaggcccaggttcgagcggaacaagttgctcctcgttgcctctgtgatccagggtctgggcctcctcttatgcttcacctacatctgcctccacttcagcgcgctccaggtcagccacaggtacccgaggatccagtcgatcaaggtacagttcaccgagtacaagaaggagaagggcttcatcctcacctcccaaaaggaggacgagatcatgaaggttcagaacaattccgtcatcatcaactgcgacgggttctacctgatctccctgaagggctacttcagccaggaggtgaacattagcctgcactatcaaaaggacgaggagccgctgttccagcttaagaaagtgcggagcgtgaactccctgatggtcgcctcacttacctacaaggataaggtgtacctgaacgtgaccaccgataacaccagcctggacgactttcacgtcaatggcggggagctgatcctgatccaccagaatcccggcgagttctgcgtgctg

SEQ ID NO: 1195 - RNA, 549 nt, synthetic construct
  misc_feature 1..549: note = Codon-optimized sequence OX40L-CO15
  source 1..549: mol_type = other RNA
atggagcgggtccagcccctcgaggagaacgttggcaacgccgccaggccccggttcgagaggaacaagctcctcctcgtcgccagcgtcatccagggcttggggctccttctctgctttacctacatctgcctccacttttccgccttacaggtcagccaccggtacccccggatccagagcatcaaagttcagttcaccgaatacaagaaggagaaaggcttcatcctcaccagccagaaggaagacgaaatcatgaaggtccagaacaattccgtcatcatcaactgtgacggtttttatctcatcagcctgaagggctacttctcgcaggaggtcaacatcagcctgcactatcagaaggacgaggagcccctgttccaactgaagaaggtgaggagcgtgaatagcctgatggtggcgtccctgacctacaaggacaaggtgtacctcaacgtgacaacggacaacaccagcctggatgacttccacgtgaacgggggcgagctgatcctcatccaccaaaaccccggcgaattctgcgtgctc

SEQ ID NO: 1196 - RNA, 549 nt, synthetic construct
  misc_feature 1..549: note = Codon-optimized sequence OX40L-CO16
  source 1..549: mol_type = other RNA
atggaaagggtacagcccctcgaggagaacgtcggcaacgccgcgcggcccaggttcgagaggaacaagctcctcctcgtcgccagcgtcatccaaggcctaggccttctactctgtttcacctacatctgcttgcactttagcgccctacaggtcagccaccggtacccccggatccagtccatcaaggtccagttcaccgagtacaagaaggagaagggcttcatcctcacctcgcagaaggaggacgagatcatgaaggtccagaataacagcgtcatcatcaactgcgacggcttttacctgatcagcctgaagggctacttttcccaggaggtgaatatctcgctgcactaccagaaggatgaggagcccctgttccagctgaaaaaagtcaggtccgtcaatagcctgatggtggcgagcctgacctacaaggacaaagtgtatctgaacgtgaccacggacaacacaagcctggatgacttccacgtgaacgggggcgagctgatcctcatccaccagaaccccggcgaattttgcgtgctg

SEQ ID NO: 1197 - RNA, 549 nt, synthetic construct
  misc_feature 1..549: note = Codon-optimized sequence OX40L-CO17
  source 1..549: mol_type = other RNA
atggaacgcgtccagcccctcgaggagaacgtcgggaacgccgcccgacccaggttcgaaaggaacaagctcttgctcgtcgccagcgtcatccagggcctcggcctcctcctctgtttcacctacatctgcctccacttctcggcgctccaggtgtcgcaccggtaccccaggatccagagcatcaaggtccagtttaccgagtataagaaggagaagggctttatactcaccagccagaaggaggacgaaatcatgaaggtacagaacaacagcgtcatcatcaactgcgacggcttttacctgatcagcctgaaggggtacttctcccaggaggtgaacatctccctccactaccagaaggacgaagaacccctgttccagctgaagaaggtacgaagcgtgaacagtctgatggtcgcctccctgacctacaaggataaagtgtatctgaacgtgaccaccgacaacacctccctggacgactttcatgtgaacggcggcgagctgatcctgatccatcagaacccgggcgagttttgtgtcctc

SEQ ID NO: 1198 - RNA, 549 nt, synthetic construct
  misc_feature 1..549: note = Codon-optimized sequence OX40L-CO18
  source 1..549: mol_type = other RNA
atggagagggtccagcccctcgaggagaacgtcggcaacgccgcccgcccgaggttcgagcggaataagctcctcctcgtcgcctccgtcatccaggggctcggtttgctcttgtgcttcacctacatctgcctccacttcagcgcccttcaggttagccaccggtacccccggatccagtccatcaaggtccagttcaccgaatacaagaaagagaaagggttcatcctcacctcccagaaggaggacgaaataatgaaggtccagaataacagcgtcatcatcaattgcgacggcttttacctgatctcgctgaagggatacttcagccaggaggtgaatatcagcctccactaccagaaggacgaggagccgctgttccagctgaagaaggtgcgaagcgtcaactccctcatggtggcgagcctgacctacaaggacaaggtctatctgaacgtgaccacggacaacaccagcctggacgactttcacgtgaacgggggcgaactgatcctgatccaccagaaccccggcgagttctgcgtgctc

SEQ ID NO: 1199 - RNA, 549 nt, synthetic construct
  misc_feature 1..549: note = Codon-optimized sequence OX40L-CO19
  source 1..549: mol_type = other RNA
atggagagggtccagccgctcgaggagaacgtaggcaacgccgccaggccacggttcgagaggaacaagctcttactcgtcgccagcgtcatccagggcctcggcttgctcctctgtttcacctacatctgtctacacttcagcgcccttcaagtcagccacaggtacccccggatccagtccatcaaggtccagttcaccgaatacaagaaagagaaggggttcatcctcacctcccagaaggaggacgagatcatgaaggtccagaacaattccgtcatcataaactgtgacggtttctacctcatcagcctgaagggctacttctcgcaggaagtgaacatcagcctgcactaccagaaggacgaagaacccctgttccagctgaagaaggtcaggagcgtcaatagcctgatggtggcctccctgacctacaaggacaaggtgtatctcaatgtcaccaccgataacacctccctcgacgacttccacgtcaacggcggggagctgatccttatccatcagaaccccggcgagttctgcgtgctc

SEQ ID NO: 1200 - RNA, 549 nt, synthetic construct
  misc_feature 1..549: note = Codon-optimized sequence OX40L-CO20
  source 1..549: mol_type = other RNA
atggagagggtccagcccctcgaagagaacgtaggcaacgccgccaggcccaggttcgagcggaacaagctcctcctcgtcgcctccgtaatccagggcctaggccttctcttatgcttcacctacatctgcctacacttctccgccctccaggtgtcacacaggtacccccgcatccagagcatcaaagtacagttcaccgagtacaagaaggagaagggcttcatcctcaccagccaaaaggaggacgagatcatgaaagtacagaataactccgtcatcatcaactgcgacgggttctacctgatctccctgaagggatacttcagccaggaggtgaacatcagcctccactaccagaaggacgaggagcccctcttccagctgaagaaggtgaggtccgtgaacagcctgatggtggccagcctcacctacaaggataaggtgtacctgaacgtgaccacggacaacacctccttggacgacttccacgtgaacggcggggaactcattctgatccaccaaaaccccggcgagttttgcgtgctg

SEQ ID NO: 1201 - RNA, 549 nt, synthetic construct
  misc_feature 1..549: note = Codon-optimized sequence OX40L-CO21
  source 1..549: mol_type = other RNA
atggagagggtccagcccctcgaggagaacgtcggcaacgccgcgaggccgaggttcgagaggaataagctcctcctcgtcgccagcgtcatccaggggctcgggttgctcctctgtttcacctatatctgcctccacttctccgccctccaggtgtcgcacaggtatccccgcatccagagcatcaaggtccaattcacggaatacaagaaggagaagggattcatcctcacctcgcagaaggaggacgagatcatgaaggtccagaacaacagcgtcatcattaactgcgacgggttttacctgatcagcctgaaggggtactttagccaggaagtgaacatctccctgcattatcagaaggatgaggagcccctgtttcagctgaaaaaggtgaggagcgtgaactccctgatggtcgccagcctgacgtacaaggacaaagtctatctgaacgtgaccaccgacaacaccagcctggatgactttcacgtgaacggcggcgagctgatcctgatacaccagaaccccggggagttctgcgtcctg

SEQ ID NO: 1202 - RNA, 549 nt, synthetic construct
  misc_feature 1..549: note = Codon-optimized sequence OX40L-CO22
  source 1..549: mol_type = other RNA
atggaaagggtacagcccctcgaggagaacgtgggcaacgccgcccgccccaggttcgagcgcaacaagctcctcctcgtggcgagcgtcatccagggcctcggcctcctcctctgcttcacgtacatctgcctccacttcagcgcgctccaagtatcccacaggtatccccgcatccagtccatcaaggtccagttcaccgaatacaagaaggagaaggggttcatcttaaccagccagaaggaggacgagatcatgaaggtacagaacaacagcgtcatcatcaactgcgacggcttctacctcatatccctgaaagggtatttctcgcaggaggtgaacataagcctgcactaccagaaggatgaggagcccctgtttcagctgaagaaagtgcggagcgtgaacagcctcatggtggcctccctgacgtacaaggacaaggtgtatctgaacgtgaccaccgataacaccagcctggacgactttcacgtgaacggaggcgagctgatcctgatccatcagaaccccggcgagttctgcgtgctg

SEQ ID NO: 1203 - RNA, 549 nt, synthetic construct
  misc_feature 1..549: note = Codon-optimized sequence OX40L-CO23
  source 1..549: mol_type = other RNA
atggagcgggtacagcccttggaggagaacgtcggcaacgccgccaggcccaggttcgagaggaataaactcctcctcgtcgcctccgtcatccagggtctaggccttctcctctgcttcacctatatctgcctccacttcagcgccctccaggttagccatcggtaccccaggatccagagcatcaaggtacagttcaccgagtacaaaaaggagaagggcttcatcctcacgtcccagaaagaggacgagatcatgaaagtccagaacaattccgtaatcatcaactgcgacggcttctacctgatcagcctgaagggctacttcagccaggaggtaaacataagcctgcactaccagaaggacgaggaacccctgttccaacttaaaaaggtgaggagcgtgaacagcctgatggtggcctccctcacctataaggacaaggtgtacctgaacgtcacgacggacaacaccagcctggatgactttcacgtgaacggcggcgagctgatcctgatccaccagaacccgggcgaattctgcgtgctg

SEQ ID NO: 1204 - RNA, 549 nt, synthetic construct
  misc_feature 1..549: note = Codon-optimized sequence OX40L-CO24
  source 1..549: mol_type = other RNA
atggagagggtccagcccttggaggagaacgtcggcaacgccgcccggcctcggttcgaacggaacaagctcctcctcgtcgccagcgtcatccaggggctcggcctcctcctctgcttcacctacatctgcctccacttctccgccctccaggtaagccaccgttaccccaggatccaaagcataaaggtccagttcaccgaatacaagaaggagaagggcttcatcctaaccagccagaaggaggacgagatcatgaaggtccagaacaactccgttatcatcaactgcgacggattctacctgatcagcctgaagggttacttcagccaggaggtgaacatcagcctgcactaccagaaggacgaggagcccctgttccagctcaagaaggtcaggtccgtgaacagcctgatggtggccagcctgacctacaaggataaggtgtacctaaatgtgacgaccgacaacacgagcctggacgacttccacgtcaacggcggcgagctgatcctcatccaccagaatccgggcgagttctgtgtgctg

SEQ ID NO: 1205 - RNA, 549 nt, synthetic construct
  misc_feature 1..549: note = Codon-optimized sequence OX40L-CO25
  source 1..549: mol_type = other RNA
atggagagggtccagcccctcgaggagaacgtcggcaacgccgcccggccccgcttcgagaggaacaaactcctcctcgtcgcgagcgtcatccagggcctcgggctcctcctctgcttcacctacatttgcctccacttctcagccttgcaggtgtcccacaggtacccgcgcatccagtccatcaaggtccagttcaccgaatacaagaaagagaaaggcttcatccttacgagccagaaggaggacgagatcatgaaggtccagaacaacagcgtaatcatcaactgtgacggcttctacctgatcagcctgaagggctacttcagccaggaggtgaacatcagcctccactaccagaaggacgaggagcccctgttccagctgaagaaggtgaggtccgtcaatagcctgatggtggcctccctcacctacaaggataaggtgtacctcaacgtgaccaccgataacacctccctggacgactttcatgtgaacggtggcgagctcatactcatccaccagaaccccggcgaattctgcgtcctg

SEQ ID NO: 1206 - RNA, 737 nt, synthetic construct
  misc_feature 1..737: note = Human OX40L with 5'-UTR, 3'-UTR, and miR-122 biding site
  source 1..737: mol_type = other RNA
gggaaataagagagaaaagaagagtaagaagaaatataagagccaccatggaaagggtccaacccctggaagagaatgtgggaaatgcagccaggccaagattcgagaggaacaagctattgctggtggcctctgtaattcagggactggggctgctcctgtgcttcacctacatctgcctgcacttctctgctcttcaggtatcacatcggtatcctcgaattcaaagtatcaaagtacaatttaccgaatataagaaggagaaaggtttcatcctcacttcccaaaaggaggatgaaatcatgaaggtgcagaacaactcagtcatcatcaactgtgatgggttttatctcatctccctgaagggctacttctcccaggaagtcaacattagccttcattaccagaaggatgaggagcccctcttccaactgaagaaggtcaggtctgtcaactccttgatggtggcctctctgacttacaaagacaaagtctacttgaatgtgaccactgacaatacctccctggatgacttccatgtgaatggcggagaactgattcttatccatcaaaatcctggtgaattctgtgtcctttgataataggctggagcctcggtggccatgcttcttgccccttgggcctccccccagcccctcctccccttcctgcacccgtaccccccaaacaccattgtcacactccagtggtctttgaataaagtctgagtgggcggc

SEQ ID NO: 1207 - RNA, 782 nt, synthetic construct
  misc_feature 1..782: note = murine OX40L with 5'-UTR, 3'-UTR, and miR-122 binding site
  source 1..782: mol_type = other RNA
gggaaataagagagaaaagaagagtaagaagaaatataagagccaccatggaaggggaaggggttcaacccctggatgagaatctggaaaacggatcaaggccaagattcaagtggaagaagacgctaaggctggtggtctctgggatcaagggagcagggatgcttctgtgcttcatctatgtctgcctgcaactctcttcctctccggcaaaggaccctccaatccaaagactcagaggagcagttaccagatgtgaggatgggcaactattcatcagctcatacaagaatgagtatcaaactatggaggtgcagaacaattcggttgtcatcaagtgcgatgggctttatatcatctacctgaagggctcctttttccaggaggtcaagattgaccttcatttccgggaggatcataatcccatctctattccaatgctgaacgatggtcgaaggattgtcttcactgtggtggcctctttggctttcaaagataaagtttacctgactgtaaatgctcctgatactctctgcgaacacctccagataaatgatggggagctgattgttgtccagctaacgcctggatactgtgctcctgaaggatcttaccacagcactgtgaaccaagtaccactgtgataataggctggagcctcggtggccatgcttcttgccccttgggcctccccccagcccctcctccccttcctgcacccgtaccccccaaacaccattgtcacactccagtggtctttgaataaagtctgagtgggcggc

SEQ ID NO: 1208 - RNA, 1363 nt, synthetic construct
  misc_feature 1..1363: note = non-translatable FIX with 5'-UTR, 3'UTR and miR-122 binding site (NST-FIX)
  source 1..1363: mol_type = other RNA
gggaaataagagagaaaagaagagtaagaagaaatataagacagcgcgtcaacattgccgaatcgccgggactcatcacaatctgcctcttgggttatctcttgtcggcagataccttcttggatcacgaaaacgcgaacaaaattcttaatcgcccgaagcggtataactccgggaaacttgaggagtttcagggcaatcttgaacgagacgaggagaactcctttgaggaggcgagggaatttgaaaacacagagcgaacaacggagttttggaagcaatacgtaggggaccagtcgaatcccctcaggggatctaaagacatcaatagctactgcccgtttgggtttgaagggaagaactagctgaccaacatcaaaaacggacgctagcagttttgtaagaactcggctgacaataaggtagtctccacagagggataccggctggcggagaaccaaaaatccgagcccgcagtcccgttcccttggaggagctcacagactagcaagttgacgagagcggagactgtattccccgacgactacgtcaacagcaccgaagccgaaacaatcctcgataacatcacgcagagcactcagtccttcaactttacgagggtcgtagaggacgcgaaacccggtcagttcccctggcaggtattgaacggaaaagtcgccttttgaggttccattgtcaacgagaagattgtcacagcggcacactgcgtagaaacaggaaaaatcacggtagcgggagagcataacattgaagagacagagcacacggaacaaaagcgaatcatcagaatcattccacaccataactataacgcggcaatcaataagtacaatcacgacatcgcacttttggagcttgacgaacctttgcttaattcgtacgtcacccctatttgtattgccgacaaagagtatacaaacatcttcttgaaattcggctccgggtacgtatcgggctggggcagattccataagggtagatccgcactgttgcaatacctcaggcccctcgatcgagccacttgtctgcggtccaccaaattcacaatctacaacaatttctcgggattccaagggagagatagctgccagggagactcagggggtccccacacggaagtcgaggggacgtcatttctgacgggaattatctcgggagaggcgaaggggaacatctacactaaatcacggttcaattggatcaaggaaaagacgaaactcacgtgataataggctggagcctcggtggccatgcttcttgccccttgggcctccccccagcccctcctccccttcctgcacccgtacccccgtggtctttgaataaagtctgagtgggcggc

SEQ ID NO: 1209 - RNA, 782 nt, synthetic construct
  misc_feature 1..782: note = non-translatable OX40L with 5'-UTR, 3'UTR, and miR-122 binding site (NST OX40L)
  source 1..782: mol_type = other RNA
gggaaataagagagaaaagaagagtaagaagaaatataagaacccgcaaggaaggggaaggggttcaacccctggaagagaatctggaaaacggatcaaggccaagattcaagaggaagaagacgctaaggctggaggtctctgggatcaagggagcagggaagcttctgagcttcatctaagtctgcctgcaactctcttcctctccggcaaaggaccctccaatccaaagactcagaggagcagttaccagaagagaggaagggcaactattcatcagctcatacaagaaagagtatcaaactaaggaggagcagaacaattcggttgtcatcaagagcgaagggctttatatcatctacctgaagggctcctttttccaggaggtcaagattgaccttcatttccgggaggatcataatcccatctctattccaaagctgaacgaaggtcgaaggattgtcttcactgaggaggcctctttggctttcaaagataaagtttacctgactgtaaaagctcctgatactctctgcgaacacctccagataaaagaaggggagctgattgttgtccagctaacgcctggatactgagctcctgaaggatcttaccacagcactgagaaccaagtaccactgtgataataggctggagcctcggtggccaagcttcttgccccttgggcctccccccagcccctcctccccttcctgcacccgtaccccccaaacaccattgtcacactccagtggtctttgaataaagtctgagtgggcggc

SEQ ID NO: 1210 - RNA, 1838 nt, synthetic construct
  misc_feature 1..1838: note = Firefly luciferase with 5'-UTR, 3'-UTR, and miR-122 binding site
  source 1..1838: mol_type = other RNA
gggaaataagagagaaaagaagagtaagaagaaatataagagccaccatggaagatgcgaagaacatcaagaagggacctgccccgttttaccctttggaggacggtacagcaggagaacagctccacaaggcgatgaaacgctacgccctggtccccggaacgattgcgtttaccgatgcacatattgaggtagacatcacatacgcagaatacttcgaaatgtcggtgaggctggcggaagcgatgaagagatatggtcttaacactaatcaccgcatcgtggtgtgttcggagaactcattgcagtttttcatgccggtccttggagcacttttcatcggggtcgcagtcgcgccagcgaacgacatctacaatgagcgggaactcttgaatagcatgggaatctcccagccgacggtcgtgtttgtctccaaaaaggggctgcagaaaatcctcaacgtgcagaagaagctccccattattcaaaagatcatcattatggatagcaagacagattaccaagggttccagtcgatgtatacctttgtgacatcgcatttgccgccagggtttaacgagtatgacttcgtccccgagtcatttgacagagataaaaccatcgcgctgattatgaattcctcgggtagcaccggtttgccaaagggggtggcgttgccccaccgcactgcttgtgtgcggttctcgcacgctagggatcctatctttggtaatcagatcattcccgacacagcaatcctgtccgtggtaccttttcatcacggttttggcatgttcacgactctcggctatttgatttgcggtttcagggtcgtacttatgtatcggttcgaggaagaactgtttttgagatccttgcaagattacaagatccagtcggccctccttgtgccaacgcttttctcattctttgcgaaatcgacacttattgataagtatgacctttccaatctgcatgagattgcctcagggggagcgccgcttagcaaggaagtcggggaggcagtggccaagcgcttccaccttcccggaattcggcagggatacgggctcacggagacaacatccgcgatccttatcacgcccgagggtgacgataagccgggagccgtcggaaaagtggtccccttctttgaagccaaggtcgtagacctcgacacgggaaaaaccctcggagtgaaccagaggggcgagctctgcgtgagagggccgatgatcatgtcaggttacgtgaataaccctgaagcgacgaatgcgctgatcgacaaggatgggtggttgcattcgggagacattgcctattgggatgaggatgagcacttctttatcgtagatcgacttaagagcttgatcaaatacaaaggctatcaggtagcgcctgccgagctcgagtcaatcctgctccagcaccccaacattttcgacgccggagtggccgggttgcccgatgacgacgcgggtgagctgccagcggccgtggtagtcctcgaacatgggaaaacaatgaccgaaaaggagatcgtggactacgtagcatcacaagtgacgactgcgaagaaactgaggggaggggtagtctttgtggacgaggtcccgaaaggcttgactgggaagcttgacgctcgcaaaatccgggaaatcctgattaaggcaaagaaaggcgggaaaatcgctgtctgataataggctggagcctcggtggccatgcttcttgccccttgggcctccccccagcccctcctccccttcctgcacccgtaccccccaaacaccattgtcacactccagtggtctttgaataaagtctgagtgggcggc

SEQ ID NO: 1211 - RNA, 85 nt, Homo sapiens; identical to SEQ ID NO: 192
  source 1..85: mol_type = other RNA

SEQ ID NO: 1212 - RNA, 22 nt, Homo sapiens
  source 1..22: mol_type = other RNA
aacgccattatcacactaaata

SEQ ID NO: 1213 - RNA, 22 nt, Homo sapiens
  source 1..22: mol_type = other RNA
tatttagtgtgataatggcgtt

SEQ ID NO: 1214 - RNA, 22 nt, Homo sapiens
  source 1..22: mol_type = other RNA
tggagtgtgacaatggtgtttg

SEQ ID NO: 1215 - RNA, 22 nt, Homo sapiens
  source 1..22: mol_type = other RNA
caaacaccattgtcacactcca

SEQ ID NO: 1216 - RNA, 47 nt, Homo sapiens; identical to SEQ ID NO: 197
  source 1..47: mol_type = other RNA

SEQ ID NO: 1217 - RNA, 47 nt, Homo sapiens; identical to SEQ ID NO: 198
  source 1..47: mol_type = other RNA

SEQ ID NO: 1218 - RNA, 145 nt, Homo sapiens; identical to SEQ ID NO: 199
  source 1..145: mol_type = other RNA

SEQ ID NO: 1219 - RNA, 42 nt, Homo sapiens; identical to SEQ ID NO: 200
  source 1..42: mol_type = other RNA

SEQ ID NO: 1220 - RNA, 47 nt, Homo sapiens; identical to SEQ ID NO: 198
  source 1..47: mol_type = other RNA

SEQ ID NO: 1221 - RNA, 145 nt, Homo sapiens; identical to SEQ ID NO: 199
  source 1..145: mol_type = other RNA

SEQ ID NO: 1222 - RNA, 42 nt, Homo sapiens; identical to SEQ ID NO: 200
  source 1..42: mol_type = other RNA

SEQ ID NO: 1223 - RNA, 47 nt, Homo sapiens; identical to SEQ ID NO: 204
  source 1..47: mol_type = other RNA

SEQ ID NO: 1224 - RNA, 47 nt, Homo sapiens; identical to SEQ ID NO: 205
  source 1..47: mol_type = other RNA

SEQ ID NO: 1225 - RNA, 47 nt, Homo sapiens; identical to SEQ ID NO: 206
  source 1..47: mol_type = other RNA

SEQ ID NO: 1226 - RNA, 47 nt, Homo sapiens; identical to SEQ ID NO: 207
  source 1..47: mol_type = other RNA

SEQ ID NO: 1227 - RNA, 47 nt, Homo sapiens; identical to SEQ ID NO: 208
  source 1..47: mol_type = other RNA

SEQ ID NO: 1228 - RNA, 47 nt, Homo sapiens; identical to SEQ ID NO: 209
  source 1..47: mol_type = other RNA

SEQ ID NO: 1229 - RNA, 47 nt, Homo sapiens; identical to SEQ ID NO: 210
  source 1..47: mol_type = other RNA

SEQ ID NO: 1230 - RNA, 47 nt, Homo sapiens; identical to SEQ ID NO: 211
  source 1..47: mol_type = other RNA

SEQ ID NO: 1231 - RNA, 47 nt, Homo sapiens; identical to SEQ ID NO: 212
  source 1..47: mol_type = other RNA

SEQ ID NO: 1232 - RNA, 47 nt, Homo sapiens; identical to SEQ ID NO: 213
  source 1..47: mol_type = other RNA

SEQ ID NO: 1233 - RNA, 47 nt, Homo sapiens; identical to SEQ ID NO: 197
  source 1..47: mol_type = other RNA

SEQ ID NO: 1234 - RNA, 92 nt, Homo sapiens
  source 1..92: mol_type = other RNA
tcaagcttttggaccctcgtacagaagctaatacgactcactatagggaaataagagagaaaagaagagtaagaagaaatataagagccacc

SEQ ID NO: 1235 - RNA, 371 nt, Homo sapiens; identical to SEQ ID NO: 215
  source 1..371: mol_type = other RNA

SEQ ID NO: 1236 - RNA, 568 nt, Homo sapiens; identical to SEQ ID NO: 216
  source 1..568: mol_type = other RNA

SEQ ID NO: 1237 - RNA, 289 nt, Homo sapiens; identical to SEQ ID NO: 217
  source 1..289: mol_type = other RNA

SEQ ID NO: 1238 - RNA, 379 nt, Homo sapiens; identical to SEQ ID NO: 218
  source 1..379: mol_type = other RNA

SEQ ID NO: 1239 - RNA, 118 nt, Homo sapiens; identical to SEQ ID NO: 219
  source 1..118: mol_type = other RNA

SEQ ID NO: 1240 - RNA, 908 nt, Homo sapiens; identical to SEQ ID NO: 220
  source 1..908: mol_type = other RNA

SEQ ID NO: 1241 - RNA, 835 nt, Homo sapiens; identical to SEQ ID NO: 221
  source 1..835: mol_type = other RNA

SEQ ID NO: 1242 - RNA, 297 nt, Homo sapiens; identical to SEQ ID NO: 222
  source 1..297: mol_type = other RNA

SEQ ID NO: 1243 - RNA, 602 nt, Homo sapiens; identical to SEQ ID NO: 223
  source 1..602: mol_type = other RNA

SEQ ID NO: 1244 - RNA, 785 nt, Homo sapiens; identical to SEQ ID NO: 224
  source 1..785: mol_type = other RNA

SEQ ID NO: 1245 - RNA, 3001 nt, Homo sapiens; identical to SEQ ID NO: 225
  source 1..3001: mol_type = other RNA

SEQ ID NO: 1246 - RNA, 1037 nt, Homo sapiens; identical to SEQ ID NO: 226
  source 1..1037: mol_type = other RNA

SEQ ID NO: 1247 - RNA, 577 nt, Homo sapiens; identical to SEQ ID NO: 227
  source 1..577: mol_type = other RNA

SEQ ID NO: 1248 - RNA, 2212 nt, Homo sapiens; identical to SEQ ID NO: 228
  source 1..2212: mol_type = other RNA

SEQ ID NO: 1249 - RNA, 729 nt, Homo sapiens; identical to SEQ ID NO: 229
  source 1..729: mol_type = other RNA

SEQ ID NO: 1250 - RNA, 847 nt, Homo sapiens; identical to SEQ ID NO: 230
  source 1..847: mol_type = other RNA

SEQ ID NO: 1251 - RNA, 110 nt, Homo sapiens; identical to SEQ ID NO: 231
  source 1..110: mol_type = other RNA

SEQ ID NO: 1252 - RNA, 116 nt, Homo sapiens; identical to SEQ ID NO: 232
  source 1..116: mol_type = other RNA

SEQ ID NO: 1253 - RNA, 141 nt, Homo sapiens
  source 1..141: mol_type = other RNA
tgataataggctggagcctcggtggccatgcttcttgccccttgggcctccccccagcccctcctccccttcctgcacccgtaccccccaaacaccattgtcacactccagtggtctttgaataaagtctgagtgggcggc

SEQ ID NO: 1254 - RNA, 138 nt, Homo sapiens
  source 1..138: mol_type = other RNA
taataggctggagcctcggtggccatgcttcttgccccttgggcctccccccagcccctcctccccttcctgcacccgtaccccccaaacaccattgtcacactccagtggtctttgaataaagtctgagtgggcggc

SEQ ID NO: 1255 - RNA, 138 nt, Homo sapiens
  source 1..138: mol_type = other RNA
taataggctggagcctcggtggccatgcttcttgccccttgggcctccccccagcccctcctccccttcctgcacccgtaccccctatttagtgtgataatggcgttgtggtctttgaataaagtctgagtgggcggc

SEQ ID NO: 1256 - RNA, 141 nt, Homo sapiens; identical to SEQ ID NO: 1253
  source 1..141: mol_type = other RNA

SEQ ID NO: 1257 - DNA, 18 bp, synthetic construct
  misc_feature 1..18: note = Syn5 promoter
  source 1..18: mol_type = other DNA
attgggcacccgtaaggg

SEQ ID NO: 1258 - protein, 8 aa, synthetic construct
  REGION 1..8: note = FLAG epitope
DYKDDDDK

SEQ ID NO: 1259 - protein, 532 aa, synthetic construct
  REGION 1..532: note = Chimeric Human hIL12AB_001
MCHQQLVISWFSLVFLASPLVAIWELKKDVYVVELDWYPDAPGEMVVLTCDTPEEDGITWTLDQSSEVLGSGKTLTIQVKEFGDAGQYTCHKGGEVLSHSLLLLHKKEDGIWSTDILKDQKEPKNKTFLRCEAKNYSGRFTCWWLTTISTDLTFSVKSSRGSSDPQGVTCGAATLSAERVRGDNKEYEYSVECQEDSACPAAEESLPIEVMVDAVHKLKYENYTSSFFIRDIIKPDPPKNLQLKPLKNSRQVEVSWEYPDTWSTPHSYFSLTFCVQVQGKSKREKKDRVFTDKTSATVICRKNASISVRAQDRYYSSSWSEWASVPCSGGGGGGSRNLPVATPDPGMFPCLHHSQNLLRAVSNMLQKARQTLEFYPCTSEEIDHEDITKDKTSTVEACLPLELTKNESCLNSRETSFITNGSCLASRKTSFMMALCLSSIYEDLKMYQVEFKTMNAKLLMDPKRQIFLDQNMLAVIDELMQALNFNSETVPQKSSLEEPDFYKTKIKLCILLHAFRIRAVTIDRVMSYLNAS

SEQ ID NO: 1260 - RNA, 1596 nt, synthetic construct
  misc_feature 1..1596: note = hIL12AB_002 (mRNA ORF)
  source 1..1596: mol_type = other RNA
atgtgccaccagcagctggtgatcagctggttcagcctggtgttcctggccagccccctggtggccatctgggagctgaagaaggacgtgtacgtggtggagctggactggtaccccgacgcccccggcgagatggtggtgctgacctgcgacacccccgaggaggacggcatcacctggaccctggaccagagcagcgaggtgctgggcagcggcaagaccctgaccatccaggtgaaggagttcggcgacgccggccagtacacctgccacaagggcggcgaggtgctgagccacagcctgctgctgctgcacaagaaggaggacggcatctggagcaccgacatcctgaaggaccagaaggagcccaagaacaagaccttcctgagatgcgaggccaagaactacagcggcagattcacctgctggtggctgaccaccatcagcaccgacctgaccttcagcgtgaagagcagcagaggcagcagcgacccccagggcgtgacctgcggcgccgccaccctgagcgccgagagagtgagaggcgacaacaaggagtacgagtacagcgtggagtgccaggaggacagcgcctgccccgccgccgaggagagcctgcccatcgaggtgatggtggacgccgtgcacaagctgaagtacgagaactacaccagcagcttcttcatcagagacatcatcaagcccgacccccccaagaacctgcagctgaagcccctgaagaacagcagacaggtggaggtgagctgggagtaccccgacacctggagcaccccccacagctacttcagcctgaccttctgcgtgcaggtgcagggcaagagcaagagagagaagaaggacagagtgttcaccgacaagaccagcgccaccgtgatctgcagaaagaacgccagcatcagcgtgagagcccaggacagatactacagcagcagctggagcgagtgggccagcgtgccctgcagcggcggcggcggcggcggcagcagaaacctgcccgtggccacccccgaccccggcatgttcccctgcctgcaccacagccagaacctgctgagagccgtgagcaacatgctgcagaaggccagacagaccctggagttctacccctgcaccagcgaggagatcgaccacgaggacatcaccaaggacaagaccagcaccgtggaggcctgcctgcccctggagctgaccaagaacgagagctgcctgaacagcagagagaccagcttcatcaccaacggcagctgcctggccagcagaaagaccagcttcatgatggccctgtgcctgagcagcatctacgaggacctgaagatgtaccaggtggagttcaagaccatgaacgccaagctgctgatggaccccaagagacagatcttcctggaccagaacatgctggccgtgatcgacgagctgatgcaggccctgaacttcaacagcgagaccgtgccccagaagagcagcctggaggagcccgacttctacaagaccaagatcaagctgtgcatcctgctgcacgccttcagaatcagagccgtgaccatcgacagagtgatgagctacctgaacgccagc

SEQ ID NO: 1261 - RNA, 1829 nt, synthetic construct
  misc_feature 1..1829: note = hIL12AB_002 (mRNA 5' UTR, ORF, 3' UTR)
  source 1..1829: mol_type = other RNA
tcaagcttttggaccctcgtacagaagctaatacgactcactatagggaaataagagagaaaagaagagtaagaagaaatataagagccaccatgtgccaccagcagctggtgatcagctggttcagcctggtgttcctggccagccccctggtggccatctgggagctgaagaaggacgtgtacgtggtggagttggattggtaccccgacgcccccggcgagatggtggtgctgacctgcgacacccccgaggaggacggcatcacctggaccctggaccagagcagcgaggtgctgggcagcggcaagaccctgaccatccaggtgaaggagttcggcgacgccggccagtacacctgccacaagggcggcgaggtgctgagccacagcctgctgctgctgcacaagaaggaggacggcatctggagcaccgacatcctgaaggaccagaaggagcccaagaacaagaccttcctgagatgcgaggccaagaactacagcggcagattcacctgctggtggctgaccaccatcagcaccgacctgaccttcagcgtgaagagcagcagaggcagcagcgacccccagggcgtgacctgcggcgccgccaccctgagcgccgagagagtgagaggcgacaacaaggagtacgagtacagcgtggagtgccaggaagatagcgcctgccccgccgccgaggagagcctgcccatcgaggtgatggtggacgccgtgcacaagctgaagtacgagaactacaccagcagcttcttcatcagagatatcatcaagcccgacccccccaagaacctgcagctgaagcccctgaagaacagccggcaggtggaggtgagctgggagtaccccgacacctggagcaccccccacagctacttcagcctgaccttctgcgtgcaggtgcagggcaagagcaagagagagaagaaagatagagtgttcaccgacaagaccagcgccaccgtgatctgcagaaagaacgccagcatcagcgtgagagcccaagatagatactacagcagcagctggagcgagtgggccagcgtgccctgcagcggcggcggcggcggcggcagcagaaacctgcccgtggccacccccgaccccggcatgttcccctgcctgcaccacagccagaacctgctgagagccgtgagcaacatgctgcagaaggcccggcagaccctggagttctacccctgcaccagcgaggagatcgaccacgaagatatcaccaaagataagaccagcaccgtggaggcctgcctgcccctggagctgaccaagaacgagagctgcctgaacagcagagagaccagcttcatcaccaacggcagctgcctggccagcagaaagaccagcttcatgatggccctgtgcctgagcagcatctacgaggacctgaagatgtaccaggtggagttcaagaccatgaacgccaagctgctgatggaccccaagcggcagatcttcctggaccagaacatgctggccgtgatcgacgagctgatgcaggccctgaacttcaacagcgagaccgtgccccagaagagcagcctggaggagcccgacttctacaagaccaagatcaagctgtgcatcctgctgcacgccttcagaatcagagccgtgaccatcgacagagtgatgagctacctgaacgccagctgataataggctggagcctcggtggccatgcttcttgccccttgggcctccccccagcccctcctccccttcctgcacccgtaccccccaaacaccattgtcacactccagtggtctttgaataaagtctgagtgggcggc

SEQ ID NO: 1262 - RNA, 1890 nt, synthetic construct; identical to SEQ ID NO: 1121
  misc_feature 1..1890: note = hIL12AB_002 (mRNA 5' UTR, ORF, 3' UTR, T100 tail)
  source 1..1890: mol_type = other RNA

SEQ ID NO: 1263 - protein, 19 aa, synthetic construct
  REGION 1..19: note = Synthetic linker
GGSGGGGSGGGSGGGGSLQ
